(19) United States
(12) Patent Application Publication
(10) Pub. No.: US 2016/0340704 A1
(43) Pub. Date: Nov. 24, 2016

(54) METHOD OF MAKING A BENZYLISOQUINOLINE ALKALOID (BIA) METABOLITE, ENZYMES THEREFORE

(71) Applicant: VALORBEC SOCIÉTÉ EN COMMANDITE, Montreal (CA)

(72) Inventors: VINCENT MARTIN, MONTREAL (CA); LAUREN NARCROSS, MONTREAL (CA); ANDREW EKINS, VERDUN (CA); ELENA FOSSATI, BLAINVILLE (CA); YUN ZHU, SAINT-LAZARE (CA)

(21) Appl. No.: 15/111,041

(22) PCT Filed: Jan. 13, 2015
(86) PCT No.: PCT/CA2015/050021

§ 371 Date: Jul. 12, 2016

Related U.S. Application Data
(60) Provisional application No. 61/926,648, filed on Jan. 13, 2014.

(51) Int. Cl. C12P 17/12; C12N 9/10; C12N 15/52; C07D 217/04; C12N 15/81

(52) U.S. Cl. CPC C12P 17/12; C07D 217/04; C12N 15/81; C12N 15/52; C12N 9/1007; C12Y 201/01075; C12Y 201/0114; C07B 2200/07

(57) ABSTRACT

There is provided a method of preparing a benzylisoquinoline alkaloid (BIA) metabolite comprising: a. culturing a host cell under conditions suitable for protein production, including a pH of between about 7 and about 10 said host cell comprising: b. a first heterologous coding sequence encoding a first enzyme involved in a metabolite pathway that converts (R,S)-norlaudanosoline into the metabolite; c. a second heterologous coding sequence encoding a second enzyme involved in a metabolite pathway that converts (R,S)-norlaudanosoline into the metabolite; d. a third heterologous coding sequence encoding a second enzyme involved in a metabolite pathway that converts (R,S)-norlaudanosoline into the metabolite; (d) adding (R,S)-norlaudanosoline to the cell culture; and recovering the metabolite from the cell culture

### CROSS REFERENCE TO RELATED APPLICATIONS

[0001] This application is a PCT application Serial No. PCT/CA2015/0* filed on Jan. 13, 2015 and published in English under PCT Article 21(2), which itself claims benefit of U.S. provisional application Ser. No. 61/926,648, filed on Jan. 13, 2014. All documents above are incorporated herein in their entirety by reference.

### STATEMENT REGARDING FEDERALLY SPONSORED RESEARCH OR DEVELOPMENT

[0002] N.A.

### FIELD OF THE INVENTION

[0003] The present invention relates to a method of making a benzylisoquinoline alkaloid (BIA) metabolite. More specifically, the present invention is concerned with an improved method of making a (BIA) metabolite (e.g., reticuline) in a recombinant host cell.

### BACKGROUND OF THE INVENTION

[0004] Plant secondary metabolites are a rich source of bioactive molecules. The chemical diversity of these compounds derives from enzymes that have diversified to perform an array of stereo- and enantioselective modifications. Coupling these reactions by chemical synthesis to reach high yields can be difficult if not impossible. While plants remain the main source of these valuable natural compounds, the use of microbial platform has emerged as an attractive alternative.

[0005] Many pharmaceutical drugs are isolated directly from plants or are semisynthetic derivatives of natural products^{1,2}. Information from New Drug Applications and clinical trials is evidence that the pharmaceutical industry continues to use natural products as a source of new drug leads³. However, the pipeline of drug discovery is difficult to sustain, due to technical challenges in isolating new compounds with diverse structures and complex chemistries in sufficient quantities for screening⁴.

[0006] Next generation DNA sequencing technology has provided rapid access to the genetic diversity underpinning the immense biosynthetic capacity of plants and microbes^{5,6}. Although Saccharomyces cerevisiae has traditionally been used for the biosynthesis of simple molecules derived from central metabolism⁷, advances in recombinant DNA technology streamlining the cloning of large DNA sequences makes this microbe an attractive platform for functional characterization of enzymes as well as the reconstitution of complex metabolic pathways^{8,9}. When combined with genetic information on an ever-increasing number of species, microbial hosts provide new opportunities for the discovery and production of diverse and complex natural products. A recent example demonstrating the power of these combined technologies is the high-level production of the artemisinin antimalarial drug precursor artemisinic acid in yeast¹⁰.

[0007] Benzylisoquinoline alkaloids (BIAs) are a diverse class of plant secondary metabolites including such pharmaceuticals as the antitussive codeine and its derivatives, the analgesic morphine and its derivatives, the antitussive and anticancer drug noscapine¹¹ and the antibacterial and potential antineoplastic drugs berberine and sanguinarine¹². Their complex molecular backbone and the presence of multiple stereocenters make the complete chemical synthesis of most BIAs commercially unfeasible¹³⁻¹⁵. Consequentially, plant extraction is the only commercial source of BIAs, which limits the diversity of BIA structures available for drug discovery due to their low abundance¹⁶. The pharmaceutical value of BIAs and advances made in the elucidation of their biosynthesis in plants have made these compounds high-value candidates for production using microbial hosts¹⁷.

[0008] Despite their structural diversity, BIAs share many common biosynthetic steps and intermediates (FIG. 1). Escherichia coli was recently engineered to produce the key BIA intermediate (S)-reticuline from glucose or glycerol^{18,19} and co-cultured with S. cerevisiae expressing heterologous enzymes to synthesize (S)-magnoflorine and (S)-scoulerine²⁰. While production of the key intermediate (S)-reticuline from simple carbon sources in E. coli is an undeniable success, S. cerevisiae is a more attractive host for BIA synthesis, due to its superior ability to express the cytochrome P450s common in downstream alkaloid synthesis²¹. Strains of S. cerevisiae were also engineered for the production of the BIA intermediates reticuline and (S)-scoulerine, and the protoberberine intermediates (S)-tetrahydrocolumbamine and (S)-canadine using the fed substrate (R,S)-norlaudanosoline²². However, gaps in biosynthetic pathways and the complexity of multi-gene co-expression in microbial hosts have prevented the production of a more diverse set of BIAs thus far.

[0009] Sanguinarine is a BIA with recognized antimicrobial activities and potential as an antineoplastic drug^{23,24}. The last steps in sanguinarine biosynthesis were recently elucidated, laying the groundwork for complete synthesis of this molecule in a heterologous host²⁵⁻²⁷. In the present invention, the applicants combine gene discovery with multi-gene heterologous expression in S. cerevisiae to reconstitute a 10-gene BIA pathway for the biosynthesis of dihydrosanguinarine and sanguinarine from the commercial precursor (R,S)-norlaudanosoline. The applicants also demonstrate the activity of tetrahydroprotoberberine cis-N-methyltransferase (TNMT) towards scoulerine and cheilanthifoline and synthesize N-methylscoulerine and N-methylcheilanthifoline in yeast and show that the pathway for reticuline synthesis from norlaudanosoline is enantioselective for (S)-reticuline. The applicants also identify novel Ring A and Ring B closers able to convert scoulerine, nandinine and/or cheilanthifoline into BIA metabolites. The reconstitution of a complex pathway for BIA synthesis in S. cerevisiae represents an important advance towards the production of a broader class of alkaloids in a microbial host.

[0010] The present description refers to a number of documents, the content of which is herein incorporated by reference in their entirety.

### SUMMARY OF THE INVENTION

[0011] Next-generation sequencing technology and the accelerated discovery of genes combined with advances in synthetic biology are opening up new opportunities for the reconstitution of plant natural product biosynthetic pathways in microbes⁴⁶. In the last five years, there has been a growing trend in the complexity and diversity of the chemical structures achieved by these pathways. For example microbes have been engineered for the synthesis of terpenoids such as artemisinin acid¹⁰ and taxa-di-ene⁴⁷, BIAs such as magnoflorine²⁰ and canadine²² and glucosinates such as indolylglucosinolate⁴⁸. Cytochrome P450s are required for the synthesis of a wide range of plant natural products and the efficient recombinant expression of this class of enzyme can be difficult. Of all pathways reconstituted in microbes thus far, only those of the mammalian hydrocortisone and plant dihydrosanguinarine pathways require the heterologous expression of four cytochrome P450s. The dihydrosanguinarine pathway described herein represents the most complex plant alkaloid biosynthetic pathway ever reconstituted in yeast and provides a glimpse into the potential of engineering microbes for the synthesis of ever more complex plant natural products.

[0012] In an aspect, the applicants reconstituted a multiple-gene plant pathway in Saccharomyces cerevisiae that allows for the production of various metabolites (e.g., reticuline, stylopine and dihydrosanguinarine and its oxidized derivative sanguinarine) from (R,S)-norlaudanosoline. Synthesis of dihydrosanguinarine also yields the side-products N-methylscoulerine and N-methylcheilanthifoline, the latter of which had not been detected in plants before then. The present invention provides the longest reconstituted alkaloid pathway ever assembled in yeast and demonstrates the feasibility of the production of high-value alkaloids in microbial systems.

[0013] More specifically, in accordance with an aspect of the present invention, there is provided a method of preparing a benzylisoquinoline alkaloid (BIA) metabolite comprising: (a) culturing a host cell under conditions suitable for protein production, including a pH of between about 7 and about 10 said host cell comprising: a. a first heterologous coding sequence encoding a first enzyme involved in a metabolite pathway that converts (R,S)-norlaudanosoline into the metabolite; b. a second heterologous coding sequence encoding a second enzyme involved in a metabolite pathway that converts (R,S)-norlaudanosoline into the metabolite; c. a third heterologous coding sequence encoding a second enzyme involved in a metabolite pathway that converts (R,S)-norlaudanosoline into the metabolite; (b) adding (R,S)-norlaudanosoline to the cell culture; and (c) recovering the metabolite from the cell culture.

[0014] More specifically, in accordance with an aspect of the present invention, there is provided a method of preparing a benzylisoquinoline alkaloid (BIA) metabolite comprising: (a) culturing a host cell under conditions suitable for protein production, said host cell comprising: a. a first heterologous coding sequence encoding a first enzyme involved in a metabolite pathway that converts (R,S)-norlaudanosoline into the metabolite; b. a second heterologous coding sequence encoding a second enzyme involved in a metabolite pathway that converts (R,S)-norlaudanosoline into the metabolite; c. a third heterologous coding sequence encoding a second enzyme involved in a metabolite pathway that converts (R,S)-norlaudanosoline into the metabolite; (b) adding (R,S)-norlaudanosoline to the cell culture; and (c) recovering the metabolite from the cell culture. In a specific embodiment, the conditions include a first pH (i.e. first fermentation at a pH of) between about 7 and about 10. This may be useful for a synthesis comprising the full or a part of the sequence of enzymes of blocks 1 and 2 (see e.g., FIG. 2), wherein CFs and/or SPS are preferably replaced by a relevant Ring B and Ring A closers, respectively (see FIG. 10-12)

[0015] in accordance with another aspect of the present invention, there is provided a method of preparing a benzylisoquinoline alkaloid (BIA) metabolite comprising: (a) culturing a host cell under conditions suitable for protein production, including a first fermentation at a pH of between about 7 and about 10, and, optionnaly followed by a second fermentation at a pH between about 3 and about 6, said host cell comprising: a. a first heterologous coding sequence encoding a first enzyme involved in a metabolite pathway that converts (R,S)-norlaudanosoline into the metabolite; b. a second heterologous coding sequence encoding a second enzyme involved in a metabolite pathway that converts (R,S)-norlaudanosoline into the metabolite; c. a third heterologous coding sequence encoding a second enzyme involved in a metabolite pathway that converts (R,S)-norlaudanosoline into the metabolite; (b) adding (R,S)-norlaudanosoline to the cell culture; and (c) recovering the metabolite from the cell culture.

[0016] In a specific embodiment of these methods, the host cell is a yeast cell. In another specific embodiment, the yeast is Saccharomyces. In another specific embodiment, the Sacharomyces is Sacharomyces cerevisiae.

[0017] In a specific embodiment, the metabolite is (S)-reticuline. In another specific embodiment, the first enzyme is 6-O-methyltransferase (6OMT); the second enzyme is coclaurine N-methyltransferase (CNMT); and/or the third enzyme is 4′-O-methyltransferase 2 (4′OMT2).

[0018] In another specific embodiment, the 6OMT is as set forth in any one of the sequences as depicted in FIG. 14A or 15A; the CNMT is as set forth in any one of the sequences as depicted in FIG. 14B or 15B; and/or the 4′OMT2 is as set forth in any one of the sequences as depicted in FIG. 14C or 15C.

[0019] In another specific embodiment, 6OMT is from Papaver somniferum; CNMT is from Papaver somniferum; and/or 4′OMT2 is from Papaver somniferum.

[0020] In another specific embodiment, Ps6OMT is as set forth in SEQ ID NO: 34 (FIG. 13); PsCNMT is as set forth in SEQ ID NO: 38 (FIG. 13); and/or Ps4′OMT2 is as set forth in SEQ ID NO: 42 (FIG. 13).

[0021] In another specific embodiment, the cell further comprises a fourth heterologous coding sequence encoding a fourth enzyme involved in a metabolite pathway that converts (R,S)-norlaudanosoline into the metabolite. In another specific embodiment, the metabolite is (S)-scoulerine. In another specific embodiment, the fourth enzyme is berberine bridge enzyme (BBE). In another specific embodiment, the BBE is as set forth in any one of the sequences as depicted in FIG. 14D or 15D. In another specific embodiment, BBE is from Papaver somniferum (Ps). In another specific embodiment, the amino acid N-terminal membrane-spanning domain from PsBBE was truncated (PsBBEΔN). In another specific embodiment, PsBBEΔN is as set forth in SEQ ID NO: 46 (FIG. 13).

[0022] In another specific embodiment, the cell further comprises a fifth heterologous coding sequence encoding a fifth enzyme involved in a metabolite pathway that converts (R,S)-norlaudanosoline into the metabolite. In another specific embodiment, the metabolite is nandinine or (S)-cheilanthifoline. In another specific embodiment, the fifth enzyme is a Ring B closer able to transform scoulerine into cheilanthifoline. In another specific embodiment, the Ring B closer is further able to transform nandinine in stylopine. In another specific embodiment, the Ring B closer is as set forth in any one of the sequences depicted in FIG. 17A-C. In another specific embodiment, the Ring B closer is as set forth in any one of the sequences depicted in FIG. 17B-C. In another specific embodiment, the Ring B closer is as set forth in any one of the sequences depicted in FIG. 17C. In another specific embodiment, the fifth enzyme is cheilanthifoline synthase (CFS). In another specific embodiment, the CFS is as set forth in any one of the sequences as depicted in FIG. 14E or 15E. In another specific embodiment, CFS is from Papaver somniferum (Ps). In another specific embodiment, PsCFS is as set forth in FIG. 13 (SEQ ID NO: 50 or 52).

[0023] In another specific embodiment, the cell further comprises a sixth heterologous coding sequence encoding a sixth enzyme involved in a metabolite pathway that converts (R,S)-norlaudanosoline into the metabolite. In another specific embodiment, the metabolite is (S)-stylopine. In another specific embodiment, the sixth enzyme is a Ring A closer able to transform cheilanthifoline in (S)-stylopine. In another specific embodiment, the Ring A closer is further able to transform scoulerine in nandinine. In another specific embodiment, the Ring A closer is as set forth in any one of the sequences depicted in FIG. 17D-E. In another specific embodiment, the Ring A closer is as set forth in any one of the sequences depicted in FIG. 17E. In another specific embodiment, the Ring B closer is as set forth in SEQ ID NO: 485 and the Ring A closer is as set forth in SEQ ID NO: 487. In another specific embodiment, the Ring B closer is as set forth in SEQ ID NO: 333; or SEQ ID NO: 377 and the Ring A closer is as set forth in SEQ ID NO: 321, SEQ ID NO: 335, SEQ ID NO: 346, SEQ ID NO: 355, SEQ ID NO: or SEQ ID NO: 380. In another specific embodiment, the sixth enzyme is stylopine syntase (SPS). In another specific embodiment, the SPS is as set forth in any one of the sequences as depicted in FIG. 14F or 15F. In another specific embodiment, SPS is from Papaver somniferum (Ps).

[0024] In another specific embodiment, the method comprises the second fermentation and wherein the cell further comprises a seventh heterologous coding sequence encoding a seventh enzyme involved in a metabolite pathway that converts (R,S)-norlaudanosoline into the metabolite. In another specific embodiment, the metabolite is (S)—N-cis-methylstylopine. In another specific embodiment, the seventh enzyme is tetrahydroprotoberberine cis-N-methyltransferase (TNMT). In another specific embodiment, the TNMT is as set forth in any one of the sequences as depicted in FIG. 14G or 14G. In another specific embodiment, TNMT is from Papaver somniferum (Ps). In another specific embodiment, PsTNMT is as set forth in SEQ ID NO: 58 (FIG. 13).

[0025] In another specific embodiment, the cell further comprises a eight heterologous coding sequence encoding a eight enzyme involved in a metabolite pathway that converts (R,S)-norlaudanosoline into the metabolite. In another specific embodiment, the metabolite is protopine. In another specific embodiment, the eighth enzyme is (S)-cis-N-methylstylopine 14-hydroxylase (MSH). In another specific embodiment, the MSH is as set forth in any one of the sequences as depicted in FIG. 14H or 14H. In another specific embodiment, MSH is from Papaver somniferum (Ps).

[0026] In another specific embodiment, wherein the cell further comprises a ninth heterologous coding sequence encoding a ninth enzyme involved in a metabolite pathway that converts (R,S)-norlaudanosoline into the metabolite. In another specific embodiment, In another specific embodiment, the metabolite is 6-hydroxyprotopine. In another specific embodiment, the ninth enzyme is protopine 6-hydroxylase (P6H). In another specific embodiment, the P6H is as set forth in any one of the sequences as depicted in FIG. 14I or 14I. In another specific embodiment, P6H is from Eschscholzia californica (Ec). In another specific embodiment, EcP6H is as set forth in SEQ ID NO: 62 (FIG. 13).

[0027] In another specific embodiment, the cell further comprises a tenth heterologous coding sequence encoding a tenth enzyme involved in a metabolite pathway that converts (R,S)-norlaudanosoline into the metabolite. In another specific embodiment, the tenth enzyme is cytochrome P450 reductase (CPR). In another specific embodiment, the CPR is as set forth in any one of the sequences as depicted in FIG. 14J or 14J. In another specific embodiment, CPR is from Papaver somniferum (Ps). In another specific embodiment, PsCPR is as set forth in SEQ ID NO: 66 (FIG. 13).

[0028] In another specific embodiment, 6OMT, CNMT and 4′OMT2 are expressed from a plasmid. In another specific embodiment, BBE and CPR are expressed from a plasmid and CFS, SPS, TNMT, MSH and P6H are expressed from a chromosome.

[0029] In another specific embodiment, the metabolite is (S)-stylopine. In another specific embodiment, the first enzyme is berberine bridge enzyme (BBE); the second enzyme is cheilanthifoline synthase (CFS) or a Ring B closer able to transform scoulerine into cheilanthifoline; the third enzyme is stylopine syntase (SPS) or a Ring A closer able to transform cheilanthifoline in (S)-stylopine; and/or the fourth enzyme is cytochrome P450 reductase (CPR).

[0030] In another specific embodiment, the BBE is as set forth in any one of the sequences as depicted in FIG. 14D or 15D; the CFS is as set forth in any one of the sequences as depicted in FIG. 14E or 15E or the Ring B closer is as set forth in any one of the sequences depiced in 17A-C; the SPS is as set forth in any one of the sequences as depicted in FIG. 14F or 15F or the Ring A closer is as set forth in any one of the sequences depiced in 17D-E; and/or the CPR is as set forth in any one of the sequences as depicted in FIG. 14J or 15J.

[0031] In another specific embodiment, BBE is from Papaver somniferum; CFS is from Papaver somniferum; SPS is from Papaver somniferum; and/or CPR is from Papaver somniferum.

[0032] In another specific embodiment, PsBBE is as set forth in SEQ ID NO: 48 (FIG. 13); PsCFS is as set forth in SEQ ID NO: 50 or 52 (FIG. 13) or the Ring B closer is as set forth in SEQ ID NO: 485 (FIG. 17); PsSPS is as set forth in SEQ ID NO: 56 (FIG. 13) or the Ring A closer is as set forth in SEQ ID NO: 487 (FIG. 17); and/or PsCPR is as set forth in SEQ ID NO: 66 (FIG. 13).

[0033] In another specific embodiment, the method comprises the second fermentation and the cell further comprises a fifth heterologous coding sequence encoding a fifth enzyme involved in a metabolite pathway that converts (R,S)-norlaudanosoline into the metabolite. In another specific embodiment, the metabolite is (S)—N-cis-methylstylopine. In another specific embodiment, the fifth enzyme is tetrahydroprotoberberine cis-N-methyltransferase (TNMT). In another specific embodiment, the TNMT is as set forth in any one of the sequences as depicted in FIG. 14G or 15G. In another specific embodiment, TNMT is from Papaver somniferum (Ps). In another specific embodiment, PsTNMT is as set forth in SEQ ID NO: 58 (FIG. 13).

[0034] In another specific embodiment, the cell further comprises a sixth heterologous coding sequence encoding a sixth enzyme involved in a metabolite pathway that converts (R,S)-norlaudanosoline into the metabolite. In another specific embodiment, the metabolite is protopine. In another specific embodiment, the sixth enzyme is (S)-cis-N-methylstylopine 14-hydroxylase (MSH). In another specific embodiment, the MSH is as set forth in any one of the sequences as depicted in FIG. 14H or 15H. In another specific embodiment, MSH is from Papaver somniferum (Ps).

[0035] In another specific embodiment, the cell further comprises a seventh heterologous coding sequence encoding a seventh enzyme involved in a metabolite pathway that converts (R,S)-norlaudanosoline into the metabolite. In another specific embodiment, the metabolite is 6-hydroxyprotopine. In another specific embodiment, the seventh enzyme is protopine 6-hydroxylase (P6H). In another specific embodiment, the P6H is as set forth in any one of the sequences as depicted in FIG. 14I or 15I. In another specific embodiment, P6H is from Eschscholzia californica (Ec). In another specific embodiment, EcP6H is as set forth in SEQ ID NO: 62 (FIG. 13).

[0036] In another specific embodiment, the BBE, CFS, SPS and CPR are expressed from plasmid(s). In another specific embodiment, the TNMT, MSH and P6H are are expressed from plasmid(s). In another specific embodiment, the BBE, CFS and SPS are expressed from chromosome.

[0037] In another specific embodiment, the method comprises the second fermentation and wherein the metabolite is (S)-dihydrosanguinarine.

[0038] In another specific embodiment, the first enzyme is tetrahydroprotoberberine cis-N-methyltransferase (TNMT); the second enzyme is (S)-cis-N-methylstylopine 14-hydroxylase (MSH); the third enzyme is protopine 6-hydroxylase (P6H); and/or the fourth enzyme is cytochrome P450 reductase (CPR).

[0039] In another specific embodiment, the TNMT is as set forth in any one of the sequences as depicted in FIG. 14G or 15G; the MSH is as set forth in any one of the sequences as depicted in FIG. 14H or 15H; the P6H is as set forth in any one of the sequences as depicted in FIG. 14I or 15I; and/or the CPR is as set forth in any one of the sequences as depicted in FIG. 14J or 15J.

[0040] In another specific embodiment, TNMT is from Papaver somniferum; MSH is from Papaver somniferum; P6H is from Eschscholzia californica; and/or CPR is from Papaver somniferum.

[0041] In another specific embodiment, PsTNMT is as set forth in SEQ ID NO: 58 (FIG. 13); PsMSH is as set forth in SEQ ID NO: 268 (FIG. 13); EcP6H is as set forth in SEQ ID NO: 62 (FIG. 13); and/or PsCPR is as set forth in SEQ ID NO: 66 (FIG. 13).

[0042] In another specific embodiment, the TNMT, MSH and P6H are expressed from a plasmid.

[0043] In another specific embodiment, the host cell further expresses a cytochrome b5 (Cytb5). In another specific embodiment, the Cytb5 is as set forth in any one of the sequences as depicted in FIG. 14K.

[0044] In accordance with another aspect of the present invention, there is provided a plasmid comprising nucleic acid encoding: (a) the 6OMT, CNMT and 4′OMT2 enzymes as defined in the present invention; (b) the (i) BBE, (ii) (a) CFS or (b) Ring B closer, and (iii) (a) SPS or (b) Ring A closer enzymes as defined in the present invention; (c) the TNMT, MSH and P6H enzymes as defined in the present invention; (c) the CPR enzyme as defined in the present invention; or (d) the BBE enzyme as defined in the present invention.

[0045] In a specific embodiment, the plasmid further comprises a terminator and/or a promoter. In another specific embodiment, the plasmid is as set forth in: SEQ ID NO: 7 (FIG. 13, pGC1062); SEQ ID NO: 8 (FIG. 13, pGC994); or SEQ ID NO: 9 (FIG. 13, pGC997).

[0046] In accordance with another aspect of the present invention, there is provided a host cell expressing (a) the 6OMT, CNMT and 4′OMT2 enzymes as defined in the present invention; (b) the (i) BBE, (ii) (a) CFS or (b) Ring B closer, and (iii) (a) SPS or (b) Ring A closer enzymes as defined in the present invention; (c) the TNMT, MSH and P6H enzymes as defined in the present invention, and the CPR enzyme as defined in the present invention; (d) the enzymes of (a) and (b); or (b) and (c); (e) the enzymes of (a), (b) and (c); or (f) one or more of the plasmids as defined in the present invention.

[0047] In a specific embodiment, the host cell expresses the enzymes of (a) in a plasmid. In another specific embodiment, the host cell expresses the enzymes of (b) in a plasmid. In another specific embodiment, the host cell expresses the enzymes of (b) in a chromosome. In another specific embodiment, the host cell expresses the enzymes of (c) in a plasmid. In another specific embodiment, the host cell expresses the enzymes of (b) and (c) in a chromosome. In another specific embodiment, the host cell expresses in a plasmid the enzymes of (a) and BBE; and in a chromosome, the enzymes of (b) and (c).

[0048] In another specific embodiment, the host cell further expresses cytochrome b5.

[0049] In accordance with another aspect of the present invention, there is provided a CYP719 polypeptide that is any one of EX45-48 (SEQ ID NOs: 324-327), EX53-58 (SEQ ID NOs: 332-337), EX65-76 (SEQ ID NOs: 344-355), EX78-80 (SEQ ID NOs: 357-359), EX82 (SEQ ID NO: 361), EX86-93 (SEQ ID NOs: 365-372), EX95-101 (SEQ ID NOs: 374-380) and EX104-105 (SEQ ID NOs: 383-384).

[0050] In accordance with another aspect of the present invention, there is provided a method of preparing a benzylisoquinoline alkaloid (BIA) metabolite comprising contacting (a) a CYP719 polypeptide of the present invention; or (b) A CYP719 polypeptide that is any one of EX43-44 (SEQ ID NOs: 322-323), EX49 (SEQ ID NO:328), EX51-52 (SEQ ID NOs: 330-331), EX63-64 (SEQ ID NOs: 342-343), EX77 (SEQ ID NO: 356) or EX103 (SEQ ID NO: 382), with scoulerine, nandinine and/or cheilanthifoline.

[0051] In accordance with another aspect of the present invention, there is provided a method of producing (i) N-methylcheilanthifoline; or (ii) N-methylcoulerine, comprising contacting cheilanthifoline or scoulerine, respectively, with tetrahydroprotoberberine cis-N-methyltransferase (TNMT), whereby (i) N-methylcheilanthifoline; or (ii) N-methylcoulerine are produced.

[0052] In accordance with another aspect of the present invention, there is provided a method of producing nandinine comprising contacting scoulerine with a Ring B closer as set forth in SEQ ID NO: 483, SEQ ID NO: 484, SEQ ID NO: 485, SEQ ID NO: 324, SEQ ID NO: 353, SEQ ID NO: 320, SEQ ID NO: 363, SEQ ID NO: 338, SEQ ID NO: 378, SEQ ID NO: 333, SEQ ID NO: 377, SEQ ID NO: 344, or SEQ ID NO: 374.

[0053] In another specific embodiment, the Ring B closer as set forth in SEQ ID NO: 484, SEQ ID NO: 485, SEQ ID NO: 324, SEQ ID NO: 333 or SEQ ID NO: 377

[0054] Other objects, advantages and features of the present invention will become more apparent upon reading of the following non-restrictive description of specific embodiments thereof, given by way of example only with reference to the accompanying drawings.

### BRIEF DESCRIPTION OF THE DRAWINGS

[0055] In the appended drawings:

[0056] FIG. 1. Common steps in the native biosynthetic pathways of structurally diverse BIAs. The L-tyrosine derivatives dopamine and 4-hydroxyphenylacetaldehyde condense to generate (S)-norcoclaurine in a reaction catalysed by the enantioselective enzyme norcoclaurine synthase (NCS). (S)-Norcoclaurine is O-methylated at positions 6 and 4′ by the enzymes 6-O-methyltransferase (6OMT) and 4′-O-methyltransferase 2 (4′OMT2) respectively, N-methylated by coclaurine-N-methyltransferase (CNMT) and hydroxylated at 3′ by (S)—N-methylcoclaurine-3′-hydroxylase (NMCH) to give (S)-reticuline. (S)-reticuline is a common precursor in the synthesis of morphinan, protoberberine and benzophenanthridine alkaloids and it is converted to (S)-scoulerine by the berberine bridge enzyme (BBE). (S)-scoulerine is also a common precursor involved in the synthesis of protoberberine and benzophenanthridine alkaloids. The common branch point intermediates (S)-reticuline and (S)-scoulerine are highlighted. Dashed arrows indicate more than one enzymatic step. Full arrows indicate single enzymatic step.

[0057] FIG. 2. Description of the enzyme block strategy used in the reconstitution of the sanguinarine biosynthetic pathway in S. cerevisiae. Enzymes were tested for functional activity by blocks of sequential enzymes and on the basis of availability of feeding substrates. Boxed text indicates alkaloids used as feeding substrates. Abbreviations are as follows: 6OMT, 6-O-methyltransferase; 4′OMT2, 4′-O-methyltransferase 2; CNMT, coclaurine-N-methyltransferase; BBE, berberine bridge enzyme; CFS, cheilanthifoline synthase (CYP719A25); SPS, stylopine synthase (CYP719A20); TNMT, tetrahydroprotoberberine cis-N-methyltransferase; MSH, (S)-cis-N-methylstylopine 14-hydroxylases (CYP82N4); P6H, protopine 6-hydroxylase (CYP82N2v2); and DBOX, dihydrobenzophenanthridine oxidase. P6H is from Eschscholzia californica, all other enzymes used in the examples presented herein are from P. somniferum. The P. somniferum cytochrome P450 reductase (CPR) was also expressed for functional expression of cytochromes P450s together with Block 2 and/or 3.

[0058] FIG. 3. Characterization of PsCFS and PsSPS. (A) Relative transcript abundance of CYP719A25 (PsCFS) and CYP719A20 (PsSPS) in opium poppy roots and stems presented as Fragments Per Kilobase of exons model per Million mapped reads (FPKM). Data presented derive from a single experiment. (B) Immunoblot analysis of microsomal proteins from S. cerevisiae strains (i) GCY1192 (expressing PsCPR); (ii) GCY1193 (expressing PsCPR and PsCFS); or (iii) a mixture of GCY1193 (expressing PsCPR and PsCFS) and GCY1194 (expressing PsCPR and PsSPSΔN). α-c-Myc and α-FLAG antibodies were used to detect CPR, and PsCFS and PsSPSΔN (arrowheads), respectively. (C) LC-MS profiles of enzyme assays of microsomal proteins from S. cerevisiae strains (i) GCY1192; (ii) GCY1193; or (iii) a mixture of GCY1193 and GCY1194 incubated with (S)-scoulerine. Abbreviation: nd—not detected.

[0059] FIG. 4. BIA yields from engineered strains incubated with pathway intermediates. (A) BIA yields from cell feeding assays of strains expressing Block 1, 2 and 3 individually or in combinations. (B) Cell feeding assays of strain GCY1125 with one of the four different substrates, namely (R,S)-norlaudanosoline (nor), (S)-reticuline (ret), (S)-scoulerine (scou), and (S)-stylopine (sty). Percent yield of end product is indicated in the appropriate column. Percent conversion was calculated as the ratio of total moles of end product recovered (sum of both cell extract and supernatant) to moles of supplemented substrate. Enzyme expressed from plasmid (dark grey); enzyme expressed from chromosome (light grey); enzymes expressed but not necessary for substrate conversion (no shading). BBE_{2μ} signifies BBE expression from a 2μ vector. Data presented represents the mean±s.d. of at least three biological replicates.

[0060] FIG. 5. LC-FT-MS profiles of BIAs from cell feeding assays. (A) Cell feeding assay of strain GCY1086 harbouring Block 1 enzymes and incubated with (R,S)-norlaudanosoline (*). (B) Cell feeding assay of strain GCY1090 harbouring Block 2 enzymes and incubated with (S)-scoulerine (*). (C) Cell feeding assay of strain GCY1094 harbouring Block 3 enzymes and incubated with (S)-stylopine (*). Chromatograms shown are the summed ion counts of supernatant and cell extract.

[0061] FIG. 6. Relative abundance of BIAs in culture supernatants and cell extracts. (A) Fractionation of BIAs in the absence of heterologous enzymes. Control strain S. cerevisiae CEN.PK2-1 D incubated with either (R,S)-norlaudanosoline (nor), (S)-reticuline (ret), (S)-scoulerine (scou), or (S)-stylopine (sty) for 0 or 16 hours. (B) Fractionation of BIAs in the presence of heterologous enzymes. Cell feeding assays of strain GCY1086 incubated with (R,S)-norlaudanosoline, strain GCY1090 incubated with (S)-scoulerine, and strain GCY1094 incubated with (S)-stylopine were extracted after 16 hours. BIAs in supernatant and cell extract fractions were analysed using LC-FT-MS. Percent BIA recovery in supernatant and cell extract relative to total BIA recovery is shown for each individual alkaloid. Nor: norlaudanosoline; 316: intermediates with m/z 316; ret: reticuline; scou: scoulerine; che: cheilanthifoline; sty: stylopine; N-st: N-methylstylopine; DHS: dihydrosanguinarine. Data presented represents the mean±s.d. of at least two biological replicates.

[0062] FIG. 7 Chiral analysis of reticuline produced from (R,S)-norlaudanosoline by engineered S. cerevisiae. HPLC-MS chromatographic profile of authentic standards of a (R)-reticuline, b (S)-reticuline and c a mixture of (S)- and (R)-reticuline. d Chiral analysis of reticuline produced from (R,S)-norlaudanosoline in cell feeding assays of strain GCY1125 expressing the opium poppy Ps6OMT, PsCNMT, Ps4′OMT2 and or a complete dihydrosanguinarine pathway. e Chiral analysis of reticuline produced from (R,S)-norlaudanosoline in cell feeding assays of strain GCY1086 expressing the opium poppy Ps6OMT, PsCNMT and Ps4′OMT2. f Methylation pathway for conversion of (R,S)-norlaudanosoline to (S)-reticuline.

[0063] FIG. 8. LC-MS analysis of alkaloids N-methylated by TNMT. (A) Cell feeding assay of strain GCY1104 harbouring Block 2 and 3 enzymes and incubated with (S)-scoulerine (*) demonstrates the accumulation of the side-products N-methylscoulerine and N-cheilanthifoline. (B) LC-FT-MS chromatographic profiles and MS spectra of BIAs from cell feeding assays of strains GCY1101 and GCY1127 incubated with (S)-scoulerine. In strain GCY1127 but not GCY1101, the products N-methylscoulerine, N-methylcheilanthifoline, and N-methylstylopine were detected. Chromatograms shown are the summed ion counts of supernatant and cell extract. Parent ion:

[0064] FIG. 9. Testing Block 2+Block 3 at different pH conditions. Abbreviations not mentioned in the text above: Scou is scoulerine, Chei is cheilanthifoline; Sty is stylopine; N-sty is N-methyl-stylopine; DHS is dihydrosanguinarine. YNB indicates YNB-DO-GLU.

[0065] FIG. 10A-B: Presents conversion of (S)-scoulerine to downstream BIAs PsSPSΔN and PsCFS used as controls. G. conversion of (S)-scoulerine into cheilanthifoline or nandinine by GC1333 strains containing an integrated PsCPR and one of CYP719s EX41 to EX105. H. conversion of (S)-scoulerine into cheilanthifoline, nandinine or stylopine by GC1316 strains containing PsCPR and PsCFS integrated into the genome and a CYP719s shown to effectively convert (S)-scoulerine into cheilanthifoline or nandinine in A.

[0066] FIG. 10C-H (C) phylogenetic tree of CYP719s generated with MEGA6; (D) Predicted activities of CYP719s based on alignments of CYP719s with published Ring A-closure, Ring B-closure, or salutaridine synthase activities (grey arrows). (E) Activity (either Ring A- or Ring B-closure) of CYP719s on (S)-scoulerine: enzymes with more (black) or less (dark grey) than 5% conversion of scoulerine are indicated. Enzymes not assayed for activity are in light grey. (F) Activity (either Ring A- or Ring B-closure) of CYP719s on (S)-scoulerine: enzymes with more (black) or less (dark grey) less than 50% conversion of scoulerine are indicated. Enzymes not assayed for activity are in light grey. (G) Activity (either Ring A- or Ring B-closure) of CYP719s on (S)-scoulerine: enzymes with more (black) or less (dark grey) less than 95% conversion of scoulerine are indicated. Enzymes not assayed for activity are in light grey. (H) Stylopine synthase activity (either Ring A closure of cheilanthifoline or Ring B closure of nandinine) of selected CYP719s: enzymes with more than 95% conversion of supplemented BIA are indicated in black.

[0067] FIG. 11A-B: showing conversion of (S)-cheilanthifoline (FIG. 11A) or (S)-nandinine (FIG. 11B) to (S)-stylopine by purchased CYP719s. Plasmids harboring CYP719s were transformed into GC1333 containing an integrated PsCPR. Strains were incubated with the appropriate BIA overnight, and then total BIAs were extracted and total molar ratios were compared. PsSPSΔN was used as a control.

[0068] FIG. 12A-B: showing conversion of (S)-scoulerine to downstream BIAs by CYP719s. More particularly, FIG. 12A it shows the ability of various combinations of two CYP719 enzymes to transform scoulerine into nandinine or cheilanthifoline, and nandinine and cheilanthifoline into stylopine and FIG. 12B compares the efficacy of various combinations of two CYP719 enzymes in terms of avoiding build-up of unwanted N-methyl side products. PsCFS, PsSPSΔN of FIG. 13 as set forth in SEQ ID NO: 50 and 54 were used as controls.

[0069] FIG. 13A-E. A) nucleotide sequences of vectors pGREG503 (SEQ ID NO: 1); pGREG504 (SEQ ID NO: 2); pGREG505 (SEQ ID NO: 3); pGREG506 (SEQ ID NO: 4); 2μ vector pYES2 (SEQ ID NO: 5); 2μ vector pESC-Leu (SEQ ID NO: 6); B) nucleotide sequences of plasmids: pGC1062 (block 1 plasmid) (SEQ ID NO: 7); pGC994 (block 2 plasmid) (SEQ ID NO: 8); pGC997 (block 3 plasmid) (SEQ ID NO: 9); pGC557 (CPR plasmid) (SEQ ID NO: 10); pGC655 (BBEΔN plasmid) (SEQ ID NO: 11); C) nucleotide sequences of promoters: TDH3 promoter (SEQ ID NO: 12); FBA1 promoter (SEQ ID NO: 13); PDC1 promoter (SEQ ID NO: 14); PMA1 promoter (SEQ ID NO: 15); GAL1 promoter (SEQ ID NO: 16); GAL10 promoter (SEQ ID NO: 17); TEF1 promoter (SEQ ID NO: 18); TEF2 promoter (SEQ ID NO: 19); PGK1 promoter (SEQ ID NO: 20); PYK1 promoter (SEQ ID NO: 21); TPI1 promoter (SEQ ID NO: 22); TDH2 promoter (SEQ ID NO: 23); ENO2 promoter (SEQ ID NO: 24); HXT9 promoter (SEQ ID NO: 25); D) nucleotide sequences of terminators: CYC1 terminator (SEQ ID NO: 26); ADH1 terminator (SEQ ID NO: 27); PGI1 terminator (SEQ ID NO: 28); ADH2 terminator (SEQ ID NO: 29); ENO2 terminator (SEQ ID NO: 30); FBA1 terminator (SEQ ID NO: 31); TDH2 terminator (SEQ ID NO: 32); TPI1 terminator (SEQ ID NO: 33); E) Amino acid and nucleotide sequences of enzymes: 6OMT (KF544154 Synthetic construct for Papaver somniferum (R,S)-norcoclaurine 6-O-methyltransferase gene, complete cds amino acid sequence (SEQ ID NO: 34) and nucleotide sequence encoding same (SEQ ID NO: 35); AY217335 Ps6OMT Papaver somniferum S-adenosyl-L-methionine:norcoclaurine 6-O-methyltransferase (SEQ ID NO: 36) and nucleotide sequence encoding same (SEQ ID NO: 37)); CNMT (KF661326 Synthetic construct S-adenosyl-L-methionine:coclaurine N-methyltransferase gene, complete cds amino acid sequence (SEQ ID NO: 38) and nucleotide sequence encoding same (SEQ ID NO: 39); AY217336 Papaver somniferum S-adenosyl-L-methionine:coclaurine N-methyltransferase mRNA, complete cds amino acid sequence (SEQ ID NO: 40) and nucleotide sequence encoding same (SEQ ID NO: 41)); 4′OMT2 (KF661327 Synthetic construct S-adenosyl-L-methionine:3′-hydroxy-N-methylcoclaurine 4′-O-methyltransferase 2 gene amino acid sequence (SEQ ID NO: 42) and nucleotide sequence encoding same (SEQ ID NO: 43); AY217334 S-adenosyl-L-methionine:3′-hydroxy-N-methylcoclaurine 4′-O-methyltransferase 2 Papaver somniferum amino acid sequence (SEQ ID NO: 44) and nucleotide sequence encoding same (SEQ ID NO: 45); BBE (Truncated Papaver somniferum BBE (PsBBEΔN) amino acid sequence (SEQ ID NO: 46) and nucleotide sequence encoding same (SEQ ID NO: 47); AF025430 Papaver somniferum berberine bridge enzyme (bbe1) gene, complete cds amino acid sequence (SEQ ID NO: 48) and nucleotide sequence encoding same (SEQ ID NO: 49); CFS (ADB89213 Papaver somniferum Cheilanthifoline synthase amino acid sequence (SEQ ID NO: 50) and nucleotide sequence encoding same (SEQ ID NO: 51); Papaver somniferum Cheilanthifoline synthase cloned into pGC994 amino acid sequence (SEQ ID NO: 52) and nucleotide sequence encoding same (SEQ ID NO: 53); SPS (Synthetic SPS gene with the N-terminus LsGAO spanning domain -KF481962 N-terminus Lactuca sativa germacrene A oxidase fused to 29 amino acids N-truncated Papaver somniferum stylopine synthase (psSPSΔN) amino acid sequence (SEQ ID NO: 54) and nucleotide sequence encoding same (SEQ ID NO: 55); PsSPS native sequence (SEQ ID NO: 56) and nucleotide sequence encoding same (SEQ ID NO: 57); TNMT (DQ028579 Papaver somniferum S-adenosyl-L-methionine:(S)-tetrahydroprotoberberine-cis-N-methyltransferase mRNA, complete cds amino acid sequence (SEQ ID NO: 58) and nucleotide sequence encoding same (SEQ ID NO: 59)); MSH (KC154003 Papaver somniferum (S)-cis-N-methylstylopine 14-hydroxylase mRNA, complete cds amino acid sequence (SEQ ID NO: 60) and nucleotide sequence encoding same (SEQ ID NO: 61)); P6H (AB598834 Eschscholzia californica P6H mRNA for protopine 6-hydroxylase, complete cds amino acid sequence (SEQ ID NO: 62) and nucleotide sequence encoding same (SEQ ID NO: 63)); CPR (KF661328 Synthetic construct NADPH:ferrihemoprotein oxidoreductase gene, complete cds amino acid sequence (SEQ ID NO: 64) and nucleotide sequence encoding same (SEQ ID NO: 65); U67185 Papaver somniferum NADPH:ferrihemoprotein oxidoreductase mRNA, complete cds amino acid sequence (SEQ ID NO: 66) and nucleotide sequence encoding same (SEQ ID NO: 67)); and cytochrome b5 (Papaver somniferum cytochrome b5 amino acid sequence (SEQ ID NO: 68) and nucleotide sequence encoding same (SEQ ID NO: 69); JQ582841 Synthetic construct cytochrome b5 gene, partial cds (derived from Artemisia annua) amino acid sequence (SEQ ID NO: 70) and nucleotide sequence encoding same (SEQ ID NO: 71)) are provided.

[0070] FIG. 14A to 14K. Present alignments of various enzymes established by Clustal™ Omega multiple sequence alignment, namely amino acid alignments of orthologs for each of enzymes 6OMT; CNMT; 4′OMT2; BBE; CFS; SPS; TNMT; MSH; P6H; CPR and Cytb5; and consensus sequences derived therefrom. In these alignments, “*” denotes that the residues in that column are identical in all sequences of the alignment, “:” denotes that conserved substitutions have been observed, and “.” denotes that semi-conserved substitutions have been observed. Consensus sequences derived from these alignments are also presented wherein X is any amino acid. Sequences corresponding to the N-terminal membrane-spanning domains of the enzymes are shaded. Sequences (those of orthologs and consensuses) devoid of these transmembrane domains are encompassed by the present invention (e.g., BBEΔN, SPSΔN, CFSΔN; MSHΔN; and P6HΔN).

[0071] FIG. 14A. 6OMT from Papaver somniferum (SEQ ID NO: 36), Papaver bracteatum (SEQ ID NO: 72), Sanguinaria canadensis (SEQ ID NO: 73), Chelidonium majus (SEQ ID NO: 74), Stylophorum diphyllum (SEQ ID NO: 75), Eschscholzia californica (SEQ ID NO: 76); Glaucium flavum (SEQ ID NO: 77), Argemone Mexicana (SEQ ID NO: 78), Thalictrum flavum (SEQ ID NO: 79), Hydrastis Canadensis (SEQ ID NO: 80), Nigella sativa (SEQ ID NO: 81), Xanthorhiza simplicissima (SEQ ID NO: 82), Berberis thunbergii (SEQ ID NO: 83), Mahonia aquifolium (SEQ ID NO: 84), Jeffersonia diphylla (SEQ ID NO: 85), Menispermum canadense (SEQ ID NO: 86), Corydalis cheilanthifolia (SEQ ID NO: 87), Nandina domestica (SEQ ID NO: 88), Cissampelos mucronata (SEQ ID NO: 89), Tinospora cordifolia (SEQ ID NO: 90), Cocculus trilobus (SEQ ID NO: 91), Coptis japonica (SEQ ID NO: 92) and consensus sequence (SEQ ID NO: 93);

[0072] FIG. 14B. CNMT from Papaver somniferum (SEQ ID NO: 40), Papaver bracteatum (SEQ ID NO: 94), Sanguinaria canadensis (SEQ ID NO: 95), Chelidonium majus candidate 1 (SEQ ID NO: 96), Chelidonium majus candidate 2 (SEQ ID NO: 97), Stylophorum diphyllum candidate 1 (SEQ ID NO: 98), Stylophorum diphyllum candidate 2 (SEQ ID NO: 99), Eschscholzia californica (SEQ ID NO: 100); Glaucium flavum (SEQ ID NO: 101), Argemone Mexicana (SEQ ID NO: 102), Corydalis cheilanthifolia (SEQ ID NO: 103), Thalictrum flavum (SEQ ID NO: 104), Hydrastis Canadensis (SEQ ID NO: 105), Nigella sativa (SEQ ID NO: 106), Xanthorhiza simplicissima (SEQ ID NO: 107), Berberis thunbergii (SEQ ID NO: 108), Jeffersonia diphylla (SEQ ID NO: 109), Nandina domestica (SEQ ID NO: 110), Menispermum canadense (SEQ ID NO: 111), Cissampelos mucronata (SEQ ID NO: 112), Tinospora cordifolia (SEQ ID NO: 113), Cocculus trilobus (SEQ ID NO: 114) and consensus sequence (SEQ ID NO: 115);

[0073] FIG. 14C. 4′OMT2 from Papaver somniferum (SEQ ID NO: 44), Papaver bracteatum (SEQ ID NO: 116), Sanguinaria canadensis (SEQ ID NO: 117), Chelidonium majus (SEQ ID NO: 118), Stylophorum diphyllum (SEQ ID NO: 119), Eschscholzia californica (SEQ ID NO: 120); Glaucium flavum (SEQ ID NO: 121), Argemone Mexicana (SEQ ID NO: 122), Corydalis cheilanthifolia (SEQ ID NO: 123), Thalictrum flavum (SEQ ID NO: 124), Hydrastis Canadensis (SEQ ID NO: 125), Nigella sativa (SEQ ID NO: 126), Xanthorhiza simplicissima (SEQ ID NO: 127), Berberis thunbergii (SEQ ID NO: 128), Mahonia aquifolium (SEQ ID NO: 129), Jeffersonia diphylla (SEQ ID NO: 130), Nandina domestica (SEQ ID NO: 131), Menispermum canadense (SEQ ID NO: 132), Cissampelos mucronata (SEQ ID NO: 133), Cocculus trilobus (SEQ ID NO: 134), Coptis japonica (SEQ ID NO: 135) and consensus sequence (SEQ ID NO: 136);

[0074] FIG. 14D. BBE from Papaver somniferum (SEQ ID NO:48), Papaver bracteatum candidate 1 (SEQ ID NO: 137), Papaver bracteatum candidate 2 (SEQ ID NO: 138), Sanguinaria canadensis (SEQ ID NO: 139), Chelidonium majus (SEQ ID NO: 140), Stylophorum diphyllum (SEQ ID NO: 141), Eschscholzia californica (SEQ ID NO: 142); Glaucium flavum (SEQ ID NO: 143), Argemone Mexicana (SEQ ID NO: 144), Corydalis cheilanthifolia (SEQ ID NO: 145), Thalictrum flavum (SEQ ID NO: 146), Hydrastis Canadensis (SEQ ID NO: 147), Xanthorhiza simplicissima (SEQ ID NO: 148), Berberis thunbergii (SEQ ID NO: 149), Jeffersonia diphylla (SEQ ID NO: 150), Nandina domestica (SEQ ID NO: 151), Cissampelos mucronata (SEQ ID NO: 152), Cocculus trilobus (SEQ ID NO: 153); and consensus sequences: full (SEQ ID NO: 154), and truncated (e.g., devoid of shaded domain) (SEQ ID NO: 155). Truncated versions of each specific species sequence is also shown (i.e., devoid of shaded domain);

[0075] FIG. 14E. CFS from Papaver somniferum (SEQ ID NO: 50), Papaver bracteatum candidate 1 (SEQ ID NO: 156), Papaver bracteatum candidate 2 (SEQ ID NO: 157), Sanguinaria canadensis candidate 1 (SEQ ID NO: 158), Sanguinaria canadensis candidate 2 (SEQ ID NO: 159), Sanguinaria canadensis candidate 3 (SEQ ID NO: 160), Sanguinaria canadensis candidate 4 (SEQ ID NO: 161), Sanguinaria canadensis candidate 5 (SEQ ID NO: 162), Sanguinaria canadensis candidate 6 (SEQ ID NO: 163), Sanguinaria canadensis candidate 7 (SEQ ID NO: 164), Sanguinaria canadensis candidate 8 (SEQ ID NO: 165), Chelidonium majus candidate 1 (SEQ ID NO: 166), Chelidonium majus candidate 2 (SEQ ID NO: 167), Chelidonium majus candidate 3 (SEQ ID NO: 168), Chelidonium majus candidate 4 (SEQ ID NO: 169), Stylophorum diphyllum candidate 1 (SEQ ID NO: 170), Stylophorum diphyllum candidate 2 (SEQ ID NO: 171), Stylophorum diphyllum candidate 3 (SEQ ID NO: 172), Eschscholzia californica candidate 1 (SEQ ID NO: 173); Eschscholzia californica candidate 2 (SEQ ID NO: 174); Eschscholzia californica candidate 3 (SEQ ID NO: 175); Eschscholzia californica candidate 4 (SEQ ID NO: 176); Eschscholzia californica candidate 5 (SEQ ID NO: 177); Glaucium flavum candidate 1 (SEQ ID NO: 178), Glaucium flavum candidate 2 (SEQ ID NO: 179), Glaucium flavum candidate 3 (SEQ ID NO: 180), Glaucium flavum candidate 4 (SEQ ID NO: 181), Argemone Mexicana candidate 1 (SEQ ID NO: 182), Corydalis cheilanthifolia candidate 1 (SEQ ID NO: 183), Coridalys cheilanthifolia candidate 2 (SEQ ID NO: 184), Corydalis cheilanthifolia candidate 3 (SEQ ID NO: 185, Thalictrum flavum candidate 1 (SEQ ID NO: 186), Thalictrum flavum candidate 2 (SEQ ID NO: 187), Thalictrum flavum candidate 3 (SEQ ID NO: 188), Hydrastis canadensis candidate 1 (SEQ ID NO: 189), Xanthorhiza simplicissima candidate 1 (SEQ ID NO: 190), Berberis thunbergii candidate 1 (SEQ ID NO: 191), Berberis thunbergii candidate 2 (SEQ ID NO: 192), Jeffersonia diphylla candidate 1 (SEQ ID NO: 193), Nandina domestica candidate 1 (SEQ ID NO: 194), Nandina domestica candidate 2 (SEQ ID NO: 195), Nandina domestica candidate 3 (SEQ ID NO: 196), Nandina domestica candidate 4 (SEQ ID NO: 197), Nandina domestica candidate 5 (SEQ ID NO: 198), Nandina domestica candidate 6 (SEQ ID NO: 199), Menispermum canadense candidate 1 (SEQ ID NO: 200); and consensus sequence (SEQ ID NO: 201). Truncated versions of each specific species and consensus sequence is also shown (i.e., devoid of shaded domain);

[0076] FIG. 14F. SPS from Papaver somniferum (SEQ ID NO:56), Papaver bracteatum candidate 1 (SEQ ID NO: 202), Sanguinaria canadensis candidate 1 (SEQ ID NO: 203), Sanguinaria canadensis candidate 2 (SEQ ID NO: 204), Sanguinaria canadensis candidate 3 (SEQ ID NO: 205), Sanguinaria canadensis candidate 4 (SEQ ID NO: 206), Chelidonium majus candidate 1 (SEQ ID NO: 207), Chelidonium majus candidate 2 (SEQ ID NO: 208), Chelidonium majus candidate 3 (SEQ ID NO: 209), Chelidonium majus candidate 4 (SEQ ID NO: 210), Chelidonium majus candidate 5 (SEQ ID NO: 211), Stylophorum diphyllum candidate 1 (SEQ ID NO: 212), Stylophorum diphyllum candidate 2 (SEQ ID NO: 213), Eschscholzia californica candidate 1 (SEQ ID NO: 214); Eschscholzia californica candidate 2 (SEQ ID NO: 215); Eschscholzia californica candidate 3 (SEQ ID NO: 216); Glaucium flavum candidate 1 (SEQ ID NO: 217), Glaucium flavum candidate 2 (SEQ ID NO: 218), Argemone Mexicana candidate 1 (SEQ ID NO: 219), Corydalis cheilanthifolia candidate 1 (SEQ ID NO: 220), Corydalis cheilanthifolia candidate 2 (SEQ ID NO: 221), Corydalis cheilanthifolia candidate 3 (SEQ ID NO: 222), Corydalis cheilanthifolia candidate 4 (SEQ ID NO: 223), Thalictrum flavum candidate 1 (SEQ ID NO: 224), Thalictrum flavum candidate 2 (SEQ ID NO: 225), Thalictrum flavum candidate 3 (SEQ ID NO: 226), Hydrastis canadensis candidate 1 (SEQ ID NO: 227), Xanthorhiza simplicissima candidate 1 (SEQ ID NO: 228), Berberis thunbergii candidate 1 (SEQ ID NO: 229), Berberis thunbergii candidate 2 (SEQ ID NO: 230), Berberis thunbergii candidate 3 (SEQ ID NO: 231), Jeffersonia diphylla candidate 1 (SEQ ID NO: 232), Nandina domestica candidate 1 (SEQ ID NO: 233), Menispermum canadense candidate 1 (SEQ ID NO: 234); and consensus sequence (SEQ ID NO: 235). Truncated versions of each specific species and consensus sequence is also shown (i.e., devoid of shaded domain);

[0077] FIG. 14G. TNMT from Papaver somniferum (SEQ ID NO:58), Papaver bracteatum (SEQ ID NO: 236), Sanguinaria canadensis (SEQ ID NO: 237), Chelidonium majus candidate 1 (SEQ ID NO: 238), Chelidonium majus candidate 2 (SEQ ID NO: 239), Stylophorum diphyllum (SEQ ID NO: 240), Eschscholzia californica (SEQ ID NO: 241); Glaucium flavum (SEQ ID NO: 242), Argemone Mexicana (SEQ ID NO: 243), Corydalis cheilanthifolia (SEQ ID NO: 244), Thalictrum flavum (SEQ ID NO: 245), Hydrastis Canadensis (SEQ ID NO: 246), Nigella sativa (SEQ ID NO: 247), Xanthorhiza simplicissima (SEQ ID NO: 248), Berberis thunbergii (SEQ ID NO: 249), Jeffersonia diphylla (SEQ ID NO: 250), Nandina domestica (SEQ ID NO: 251), Menispermum canadense (SEQ ID NO: 252), Cissampelos mucronata (SEQ ID NO: 253), Tinospora cordifolia (SEQ ID NO: 254), Cocculus trilobus (SEQ ID NO: 255), and consensus sequence (SEQ ID NO: 256);

[0078] FIG. 14H. MSH from Papaver somniferum (SEQ ID NO:60), Papaver bracteatum (SEQ ID NO: 257), Sanguinaria canadensis (SEQ ID NO: 258), Chelidonium majus (SEQ ID NO: 259), Stylophorum diphyllum (SEQ ID NO: 260), Eschscholzia californica (SEQ ID NO: 261); Glaucium flavum (SEQ ID NO: 262), Argemone Mexicana (SEQ ID NO: 263), Corydalis cheilanthifolia (SEQ ID NO: 264), Thalictrum flavum (SEQ ID NO: 265), Xanthorhiza simplicissima (SEQ ID NO: 266), Nandina domestica (SEQ ID NO: 267); and consensus sequence (SEQ ID NO: 268). Truncated versions of each specific species and consensus sequence is also shown (i.e., devoid of shaded domain);

[0079] FIG. 14I. P6H from Eschscholzia californica (SEQ ID NO: 62); Papaver somniferum (SEQ ID NO:269), Papaver bracteatum (SEQ ID NO: 270), Sanguinaria canadensis (SEQ ID NO: 271), Chelidonium majus (SEQ ID NO: 272), Stylophorum diphyllum (SEQ ID NO: 273), Glaucium flavum (SEQ ID NO: 274), Argemone Mexicana (SEQ ID NO: 275), Corydalis cheilanthifolia (SEQ ID NO: 276), Thalictrum flavum (SEQ ID NO: 277), Nandina domestica (SEQ ID NO: 278); and consensus sequence (SEQ ID NO: 279). Truncated versions of each specific species and consensus sequence is also shown (i.e., devoid of shaded domain);

[0080] FIG. 14J. CPR from Papaver somniferum (SEQ ID NO:66), Papaver bracteatum candidate 1 (SEQ ID NO: 280), Papaver bracteatum candidate 2 (SEQ ID NO: 281), Sanguinaria canadensis candidate 1 (SEQ ID NO: 282), Sanguinaria canadensis candidate 2 (SEQ ID NO: 283), Chelidonium majus candidate 1 (SEQ ID NO: 284), Chelidonium majus candidate 2 (SEQ ID NO: 285), Chelidonium majus candidate 3 (SEQ ID NO: 286), Stylophorum diphyllum candidate 1 (SEQ ID NO: 287), Stylophorum diphyllum candidate 2 (SEQ ID NO: 288), Eschscholzia californica candidate 1 (SEQ ID NO: 289); Glaucium flavum candidate 1 (SEQ ID NO: 290), Glaucium flavum candidate 2 (SEQ ID NO: 291), Argemone Mexicana candidate 1 (SEQ ID NO: 292), Argemone Mexicana candidate 2 (SEQ ID NO: 293), Corydalis cheilanthifolia candidate 1 (SEQ ID NO: 294), Corydalis cheilanthifolia candidate 2 (SEQ ID NO: 295), Thalictrum flavum candidate 1 (SEQ ID NO: 296), Thalictrum flavum candidate 2 (SEQ ID NO: 297), Hydrastis canadensis candidate 1 (SEQ ID NO: 298), Nigella sativa candidate 1 (SEQ ID NO: 299), Xanthorhiza simplicissima candidate 1 (SEQ ID NO: 300), Xanthorhiza simplicissima candidate 2 (SEQ ID NO: 301), Berberis thunbergii candidate 1 (SEQ ID NO: 302), Mahonia aquifolium candidate 1 (SEQ ID NO: 303), Mahonia aquifolium candidate 2 (SEQ ID NO: 304), Jeffersonia diphylla candidate 1 (SEQ ID NO: 305), Nandina domestica candidate 1 (SEQ ID NO: 306), Nandina domestica candidate 2 (SEQ ID NO: 307), Menispermum canadense candidate 1 (SEQ ID NO: 308), Menispermum canadense candidate 2 (SEQ ID NO: 309), Cissampelos mucronata candidate 1 (SEQ ID NO: 310), Cissampelos mucronata candidate 2 (SEQ ID NO: 311), Cissampelos mucronata candidate 3 (SEQ ID NO: 312), Tinospora cordifolia candidate 1 (SEQ ID NO: 313), Tinospora cordifolia candidate 2 (SEQ ID NO: 314), Tinospora cordifolia candidate 3 (SEQ ID NO: 315), and consensus sequence (SEQ ID NO: 316);

[0081] FIG. 14K. Cytochrome 85 from Papaver somniferum (SEQ ID NO: 68) and Artemisia annua (SEQ ID NO: 318), and consensus sequence (SEQ ID NO: 319).

[0082] FIG. 15 presents alignments of the enzymes of FIG. 13 established by Clustal™ Omega multiple sequence alignment, namely amino acid alignments of orthologs also shown in FIG. 14 for each of enzymes 6OMT; CNMT; 4′OMT2; BBE; CFS; SPS; TNMT; MSH; P6H; and CPR; and consensuses derived therefrom. Consensus sequences identified as 60%, 70%, 75%, 80%, 85%, 90% and 95% are presented for each alignments. In these consensuses, small “o” denotes alcohol and refers to S or T; small “I” denotes aliphatic and refers to I, L or V; period “.” denotes any amino acid; small “a” denotes aromatic and refers to F, H, W or Y; small “c” denotes charged and refers to D, E, H, K or R; small “h” denotes hydrophobic and refers to A, C, F, G, H, I, K, L, M, R, T, V, W or Y; minus sign “−” denotes negative and refers to D or E; small “p” denotes polar and refers to C, D, E, H, K, N, Q, R, S or T; plus sign “+” denotes positive and refers to H, K or R; small “s” denotes small and refers to A, C, D, G, N, P, S, T or V; small “u” denotes tiny and refers to A, G or S; small “t” denotes turnlike and refers to A, C, D, E, G, H, K, N, Q, R, S and T.

[0083] FIG. 16 presents the amino acid sequences of CYP719s EX41 to EX105 (SEQ ID NOs: 320-384).

[0084] FIG. 17A presents an alignment of Ring B closers (scoulerine to cheilanthifoline and/or nandinine to stylopine) identified herein (EX45 (SEQ ID NO: 324); EX74 (SEQ ID NO: 353); EX41 (SEQ ID NO: 320); EX84 (SEQ ID NO: 363); EX59 (SEQ ID NO: 338); EX99 (SEQ ID NO: 378); EX54 (SEQ ID NO: 333); EX98 (SEQ ID NO: 377); EX65 (SEQ ID NO: 344); and EX95 (SEQ ID NO: 374)) and an alignment derived therefrom (SEQ ID NO: 483). FIG. 17B presents an alignment of three Ring B closers of FIG. 17A able to convert scoulerine to nandinine and cheilanthifoline to stylopine (EX45 (SEQ ID NO: 324); EX54 (SEQ ID NO: 333); and EX98 (SEQ ID NO: 377)) and an alignment derived therefrom (SEQ ID NO: 484). FIG. 17C presents an alignment of two Ring B closers of FIG. 17A able to convert scoulerine to nandinine and cheilanthifoline to stylopine (EX54 (SEQ ID NO: 333); and EX98 (SEQ ID NO: 377)) and an alignment derived therefrom (SEQ ID NO: 485). FIG. 17D presents an aligment of Ring A closers (scoulerine to nandinine and/or cheilanthifoline to stylopine) identified herein (EX76 (SEQ ID NO: 355); EX48 (SEQ ID NO: 327); EX46 (SEQ ID NO: 325); EX47 (SEQ ID NO: 326); EX66 (SEQ ID NO: 345); EX60 (SEQ ID NO: 339); EX42 (SEQ ID NO: 321); EX61 (SEQ ID NO: 340); EX96 (SEQ ID NO: 375); EX67 (SEQ ID NO: 346); EX56 (SEQ ID NO: 335); EX101 (SEQ ID NO: 380); EX44 (SEQ ID NO: 323); EX103 (SEQ ID NO: 382); EX50 (SEQ ID NO: 329); EX105 (SEQ ID NO: 384); EX69 (SEQ ID NO: 348); and EX72 (SEQ ID NO: 351)) and an alignment derived therefrom (SEQ ID NO: 486). FIG. 17E presents an alignment of Ring A closers of FIG. 17D able to convert scoulerine to cheilanthifoline (EX50 (SEQ ID NO: 329); EX76 (SEQ ID NO: 355); EX42 (SEQ ID NO: 321); EX96 (SEQ ID NO: 375); EX67 (SEQ ID NO: 346); EX56 (SEQ ID NO: 335); and EX101 (SEQ ID NO: 380)) and nandinine to stylopine and an alignment derived therefrom (SEQ ID NO: 487).

[0085] FIG. 18 presents percent identity between each pair of CYP719 EX41 to EX105.

[0086] FIG. 19. (S)-scoulerine and selected derivatives in the sanguinarine and noscapine pathways. In the sanguinarine pathway, two CYP719s act on scoulerine (boxed), converting it first to either nandinine or cheilanthifoline, and then to stylopine. TNMT (tetrahydroberberine cis-N-methyltransferase) can N-methylate scoulerine, nandinine, cheilanthifoline, and stylopine. For sanguinarine synthesis, N-methylstylopine is the desired product. In the noscapine pathway, scoulerine is O-methylated at the 9′ position by SOMT (scoulerine-9-O-methyltransferase), yielding tetrahydrocolumbamine. A CYP719 then converts tetrahydrocolumbamine to canadine. The enzyme TNMT can N-methylate scoulerine, tetrahydrocolumbamine, and canadine. For noscapine synthesis, N-methylcanadine is the desired product. All indicated BIAs are (S)-enantiomers.

[0087] FIG. 20A-B. Role of CYP719 and TNMT in the noscapine pathway. A. Synthesis of the noscapine precursor N-methylcanadine and synthesis of the side-products N-methylscoulerine and N-methytetrahydrocolumbamine (N-methylTHC) from (S)-scoulerine. B. Alkaloid profile obtained when yeast strains CEN.PK2-1D expressing PsTNMT alone or PsTNMT together with PsSOMT, PsCAS (CYP719A21) and PsCPR are supplemented with 100 μM of scoulerine at pH 8.

[0088] FIG. 21. Total recovery of supplemented BIAs. Strains expressing no heterologous enzymes were incubated overnight with 5 uM (R,S)-norlaudanosoline (A), (S)-scoulerine (B), or (S)-stylopine (C) in YNB or media buffered to pH 6, 7, 8, or 9. After 16 hours, supplemented BIAs were extracted and analyzed by HPLC-FT-MS.

[0089] FIG. 22. Relative recovery of supplemented BIAs in supernatant and cell extract fractions of yeast cultures. Strains expressing no heterologous enzymes were incubated overnight with 5 uM (R,S)-norlaudanosoline (A), (S)-scoulerine (B), or (S)-stylopine (C) in YNB or media buffered to pH 6, 7, 8, or 9. After 16 hours, supplemented BIAs were extracted and analyzed by HPLC-FT-MS.

[0090] FIG. 23 Turnover of supplemented BIAs to downstream end products. Strains expressing Block 1 enzymes (A: GCY1086), Block 2 enzymes and CPR (B: GCY1090), or Block 3 enzymes and CPR (C: GCY1094) were incubated overnight with 5 uM (R,S)-norlaudanosoline, (S)-scoulerine, or (S)-stylopine, respectively, in YNB or media buffered to pH 6, 7, 8, or 9. After 16 hours, total BIAs were extracted and analyzed by HPLC-FT-MS.

[0091] FIG. 24A-B: Description of the pBOT vector system. (A) Schematized description of vector. The four pBOT versions available contain a different auxotrophy (LEU, URA, HIS or TRP) and different promoter-terminator pairs associated with each auxotrophy. (B) Plasmid (SEQ ID NOs: 568-569), gene (SEQ ID NOs: 570-571), and ligation product (SEQ ID NOs: 572-573). Any gene of interest can be cloned by SapI restriction digestion and ligation.

### DESCRIPTION OF ILLUSTRATIVE EMBODIMENTS

### Definitions

### General Definitions

[0092] Headings, and other identifiers, e.g., (a), (b), (i), (ii), etc., are presented merely for ease of reading the specification and claims. The use of headings or other identifiers in the specification or claims does not necessarily require the steps or elements be performed in alphabetical or numerical order or the order in which they are presented.

[0093] In the present description, a number of terms are extensively utilized. In order to provide a clear and consistent understanding of the specification and claims, including the scope to be given such terms, the following definitions are provided.

[0094] The use of the word “a” or “an” when used in conjunction with the term “comprising” in the claims and/or the specification may mean “one” but it is also consistent with the meaning of “one or more”, “at least one”, and “one or more than one”.

[0095] Throughout this application, the term “about” is used to indicate that a value includes the standard deviation of error for the device or method being employed to determine the value. In general, the terminology “about” is meant to designate a possible variation of up to 10%. Therefore, a variation of 1, 2, 3, 4, 5, 6, 7, 8, 9 and 10% of a value is included in the term “about”. Unless indicated otherwise, use of the term “about” before a range applies to both ends of the range.

[0096] As used in this specification and claim(s), the words “comprising” (and any form of comprising, such as “comprise” and “comprises”), “having” (and any form of having, such as “have” and “has”), “including” (and any form of including, such as “includes” and “include”) or “containing” (and any form of containing, such as “contains” and “contain”) are inclusive or open-ended and do not exclude additional, un-recited elements or method steps.

[0097] As used herein, the term “consists of” or “consisting of” means including only the elements, steps, or ingredients specifically recited in the particular claimed embodiment or claim.

### Enzymes

[0098] The present invention relates to enzymes involved in a BIA synthetic pathway encoded by plasmids or chromosomes in a host cell and improved methods of use thereof to produce various BIA metabolites.

[0099] Without being so limited, enzymes encompassed by the present invention include: native or synthetic 6-O-methyltransferase (6OMT); coclaurine-N-methyltransferase (CNMT); 4′-O-methyltransferase 2 (4′OMT2); berberine bridge enzyme (BBE); cheilanthifoline synthase (CFS); stylopine synthase (SPS); protoberberine Ring A closer (e.g., able to convert scoulerine into nandinine and/or cheilanthifoline into stylopine); Ring A closer able to promote production of N-methylcanadine by a high affinity to tetrahydrocolumbamine (e.g., noscapine pathway), protoberberine Ring B closer (e.g., able to convert scoulerine into cheilanthifoline and/or nandinine into stylopine); tetrahydroprotoberberine cis-N-methyltransferase (TNMT); (S)-cis-N-methylstylopine 14-hydroxylases (MSH); protopine 6-hydroxylase (P6H); cytochrome P450 reductase (CPR); cytochrome b5 and dihydrobenzophenanthridine oxidase (DBOX). Useful enzymes for the present invention may be isolated from Papaver somniferum, Eschscholzia californica, other Papaveraceae (e.g., Papaver bracteatum, Sanguinaria canadensis, Chelidonium majus, Stylophorum diphyllum, Glaucium flavum, Argemone mexicana and Corydalis cheilanthifolia), Ranunculaceae (e.g., Thalictrum flavum, Aquilegia Formosa, Hydrastis canadensis, Nigella sativa, Xanthorhiza simplicissima and Coptis japonica), Berberidaceae (e.g., Berberis thunbergii, Mahonia aquifolium, Jeffersonia diphylla, and Nandina domestica), or Menispermaceae (e.g., Menispermum canadense, Cissampelos mucronata, Tinospora cordifolia, and Cocculus trilobus), etc. The truncated (e.g., devoid of transmembrane domains) and full amino acid sequences of illustrative examples of these enzymes are presented in Figs. herein (e.g., FIGS. 13 to 17).

[0100] Consensuses derived from the alignments of certain of these orthologues are also presented in FIGS. 14 to 17. In specific embodiment of these consensuses, each X in the consensus sequences (e.g., consensuses in FIGS. 14 and 17) is defined as being any amino acid, or absent when this position is absent in one or more of the orthologues presented in the alignment. In specific embodiment of these consensuses, each X in the consensus sequences is defined as being any amino acid that constitutes a conserved or semi-conserved substitution of any of the amino acid in the corresponding position in the orthologues presented in the alignment, or absent when this position is absent in one or more of the orthologues presented in the alignment. In FIGS. 14 and 17, conservative substitutions are denoted by the symbol “:” and semi-conservative substitutions are denoted by the symbol “.”. In another embodiment, each X refers to any amino acid belonging to the same class as any of the amino acid residues in the corresponding position in the orthologues presented in the alignment, or absent when this position is absent in one or more of the orthologues presented in the alignment. In another embodiment, each X refers to any amino acid in the corresponding position of the orthologues presented in the alignment, or absent when this position is absent in one or more of the orthologues presented in the alignment. The Table below indicates which amino acid belongs to each amino acid class.

| Class | Name of the amino acids |
|---|---|
| Aliphatic | Glycine, Alanine, Valine, Leucine, Isoleucine |
| Hydroxyl or Sulfur/ | Serine, Cysteine, Selenocysteine, |
| Selenium-containing | Threonine, Methionine |
| Cyclic | Proline |
| Aromatic | Phenylalanine, Tyrosine, Tryptophan |
| Basic | Histidine, Lysine, Arginine |
| Acidic and their Amide | Aspartate, Glutamate, Asparagine, Glutamine |

[0101] In other specific embodiments of the enzymes as used in the present invention (e.g., consensuses in FIG. 15), the small “o” denotes alcohol and refers to S or T; small “I” denotes aliphatic and refers to I, L or V; period “.” denotes any amino acid; small “a” denotes aromatic and refers to F, H, W or Y; small “c” denotes charged and refers to D, E, H, K or R; small “h” denotes hydrophobic and refers to A, C, F, G, H, I, K, L, M, R, T, V, W or Y; minus sign “−” denotes negative and refers to D or E; small “p” denotes polar and refers to C, D, E, H, K, N, Q, R, S or T; plus sign “+” denotes positive and refers to H, K or R; small “s” denotes small and refers to A, C, D, G, N, P, S, T or V; small “u” denotes tiny and refers to A, G or S; small “t” denotes turnlike and refers to A, C, D, E, G, H, K, N, Q, R, S and T.

[0102] Hence enzymes in accordance with the present invention include enzymes having the specific nucleotide or amino acid sequences described in FIGS. 13 to 17, or an amino acid sequence that satisfies any of the consensuses as defined above (e.g., FIGS. 14 and 17). In particular, it includes enzyme sequences satisfying the consensus sequences described in FIGS. 14A to K and 17 (full and truncated (e.g. devoid of shaded domain)) wherein the one or more Xs are defined as above. It also refers to consensus sequences described in FIGS. 15A to J. It also refers to consensus sequences of catalytic domains of these enzymes. Enzyme sequences in accordance with the present invention include the specific sequences described in FIGS. 13 to 17 with up to 10 amino acids (9, 8, 7, 6, 5, 4, 3, 2 or 1) truncated at the N- and/or C-terminal thereof.

[0103] In a more specific embodiment, the enzymes are from Papaver somniferum, Eschscholzia californica, Argemone mexicana, Aquilegia formosa, Corydalis cheilanthifolia, Coptis chinensis, Coptis japonica, Chelidonium majus, Cissampelos mucronata, Glaucium flavum, Hydrastis canadensis, Mahonia aquifolium, Menispermum canadense, Nandina domestica, Nelumbo nucifera, Papaver bracteatum, Podophyllum peltatum, Sanguinaria canadensis, Stylophorum diphyllum, Sinopodophyllum hexandrum, Thalictrum flavum or Xanthorhiza simplicissima. In a more specific embodiment, the P6H, when present is from Eschscholzia californica; and/or 6OMT, CNMT, 4′OMT2, BBE, CFS, SPS, TNMT, MSH, P6H, CPR and/or cytochrome b5, when present are from Papaver somniferum and/or the protoberberine Ring A closer (e.g., able to convert scoulerine into nandinine and/or cheilanthifoline into stylopine) are from Eschscholzia californica, Argemone mexicana, Aquilegia formosa, Corydalis cheilanthifolia, Coptis japonica, Chelidonium majus, Glaucium flavum, Mahonia aquifolium, Nandina domestica, Sanguinaria canadensis, Stylophorum diphyllum, Thalictrum flavum or Xanthorhiza simplicissima and/or the protoberberine Ring B closer (e.g. able to convert scoulerine into cheilanthifoline and/or nandinine into stylopine) are from Papaver somniferum, Eschscholzia californica, Argemone mexicana, Corydalis cheilanthifolia, Chelidonium majus, Glaucium flavum, Nandina domestica, Sanguinaria canadensis, or Stylophorum diphyllum.

[0104] For example, the enzymes may be as described in FIG. 13. Hence 6-OMT as depicted in FIG. 13, SEQ ID NO: 34 (Papaver somniferum derived—codon-optimized by DNA2.0 for optimal expression in yeast) and encoded by SEQ ID NO: 35; or as depicted in in FIG. 13, SEQ ID NO: 36 (Papaver somniferum native) and encoded by SEQ ID NO: 37; CNMT as depicted in FIG. 13, SEQ ID NO: 38 (Papaver somniferum derived—codon-optimized by DNA2.0 for optimal expression in yeast) and encoded by SEQ ID NO: 39; or as depicted in in FIG. 13, SEQ ID NO: 40 (Papaver somniferum native) and encoded by SEQ ID NO: 41; 4′OMT2 as depicted in FIG. 13, SEQ ID NO: 42 (Papaver somniferum derived—codon-optimized by DNA2.0 for optimal expression in yeast) and encoded by SEQ ID NO: 43; or as depicted in in FIG. 13, SEQ ID NO: 44 (Papaver somniferum native) and encoded by SEQ ID NO: 45; BBE as depicted in FIG. 13, SEQ ID NO: 46 (Papaver somniferum truncated (PsBBEΔN)) and encoded by SEQ ID NO: 47; or as depicted in in FIG. 13, SEQ ID NO: 48 (Papaver somniferum native (PsBBE)) and encoded by SEQ ID NO: 49; CFS as depicted in FIG. 13, SEQ ID NO: 50 (ADB89213 Papaver somniferum CFS) and encoded by SEQ ID NO: 51; or SEQ ID NO: 52 (psCFS cloned into pGC994) and encoded by SEQ ID NO: 53; SPS as depicted in FIG. 13, SEQ ID NO: 54 (truncated Papaver somniferum with N-terminus LsGAO spanning domain (SPSΔN)) and encoded by SEQ ID NO: 55; TNMT as depicted in FIG. 13, SEQ ID NO: 58 (native Papaver somniferum TNMT) and encoded by SEQ ID NO: 59; MSH as depicted in FIG. 13, SEQ ID NO: 60 (native Papaver somniferum MSH) and encoded by SEQ ID NO: 61; P6H as depicted in FIG. 13, SEQ ID NO: 62 (native Eschscholzia californica P6H) and encoded by SEQ ID NO: 63; CPR as depicted in FIG. 13, SEQ ID NO: 64 (Papaver somniferum derived—codon-optimized by DNA2.0 for optimal expression in yeast) and encoded by SEQ ID NO: 65; or as depicted in FIG. 13, SEQ ID NO: 66 (Papaver somniferum native) and encoded by SEQ ID NO: 67; cytochrome b5 as depicted in FIG. 13, SEQ ID NO: 68 (Papaver somniferum b5) and encoded by SEQ ID NO: 69; or as depicted in FIG. 13, SEQ ID NO: 70 (Artemisia annua derived b5) and encoded by SEQ ID NO: 71; Protoberine Ring B closer as depicted in FIG. 16, FIG. 17A, FIG. 17B or FIG. 17C (e.g., EX45 (SEQ ID NO: 324); EX74 (SEQ ID NO: 353); EX41 (SEQ ID NO: 320); EX84 (SEQ ID NO: 363); EX59 (SEQ ID NO: 338); EX99 (SEQ ID NO: 378); EX54 (SEQ ID NO: 333); EX98 (SEQ ID NO: 377); EX65 (SEQ ID NO: 344); and EX95 (SEQ ID NO: 374)); and Protoberine Ring A closer as depicted in FIG. 16, 17D or 17E (e.g., EX76 (SEQ ID NO: 355); EX48 (SEQ ID NO: 327); EX46 (SEQ ID NO: 325); EX47 (SEQ ID NO: 326); EX66 (SEQ ID NO: 345); EX60 (SEQ ID NO: 339); EX42 (SEQ ID NO: 321); EX61 (SEQ ID NO: 340); EX96 (SEQ ID NO: 375); EX67 (SEQ ID NO: 346); EX56 (SEQ ID NO: 335); EX101 (SEQ ID NO: 380); EX44 (SEQ ID NO: 323); EX103 (SEQ ID NO: 382); EX50 (SEQ ID NO: 329); EX105 (SEQ ID NO: 384); EX69 (SEQ ID NO: 348); and EX72 (SEQ ID NO: 351)) and an alignment derived therefrom (SEQ ID NO: 486).

[0105] Percent identities between amino acid sequences of certain enzymes of the present invention are also presented (see e.g., FIG. 18 showing percent identities of pairs protoberberine Ring A or Ring B closers of the present invention). Hence enzyme sequences in accordance with the present invention include enzymes with amino acid sequences having high percent identities (e.g., at least 50%, 55%, 60%, 65%, 70%, 75%, 80%, 85%, 90%, 95%, 96%, 97%, 97%, 98% and 99% identity) with enzymes specifically disclosed in the present invention and in particular with those shown to display useful activity (see e.g., Figs. of present invention).

[0106] Relatedness of enzymes of the present invention are also presented by way of phylogenetic trees (see e.g., FIG. 10C-H for protoberberine Ring A or Ring B closers of the present invention). Hence enzyme sequences in accordance with the present invention include enzymes shown to be related with enzymes specifically disclosed in the present invention and in particular with those shown to display useful activity for a purpose of the present invention (see e.g., Figs. of present invention) through phylogenetic trees.

[0107] The enzymes could also be modified for better expression/stability/yield in the host cell (e.g., replacing the native N-terminal membrane-spanning domain by the N-terminal membrane-spanning domain from another plant or yeast gene (e.g., Lactuca sativa (lettuce) germacrene A oxidase) or from a yeast ER bound protein (e.g., erg1 or erg8); codon optimization for expression in the heterologous host; use of different combinations of promoter/terminators for optimal coexpression of multiple enzymes; spatial colocalization of sequential enzymes using a linker system or organelle-specific membrane domain. In a more specific embodiment, useful enzymes are as shown in FIGS. 13-17. Transmembrane domains can be predicted using, for example, the software TMpred™ (ExPASy) http://www.ch.embnet.org/software/TMPRED_form.html. Tmpred predicted alpha-helix transmembrane domains for: CFS: AA 3 to 24; MSH: AA 18 to 36; and P6H: AA 8 to 27. These domains could be replaced by different transmembrane domains and/or simply truncated (e.g., BBEΔN) and lead to proper folded, stable and functional transmembrane proteins.

[0108] A substantially identical sequence may comprise one or more conservative amino acid mutations. It is known in the art that one or more conservative amino acid mutations to a reference sequence may yield a mutant peptide with no substantial change in physiological, chemical, or functional properties compared to the reference sequence; in such a case, the reference and mutant sequences would be considered “substantially identical” polypeptides. Conservative amino acid mutation may include addition, deletion, or substitution of an amino acid; a conservative amino acid substitution is defined herein as the substitution of an amino acid residue for another amino acid residue with similar chemical properties (e.g., size, charge, or polarity).

[0109] In a non-limiting example, a conservative mutation may be an amino acid substitution. Such a conservative amino acid substitution may be a basic, neutral, hydrophobic, or acidic amino acid for another of the same group. By the term “basic amino acid” it is meant hydrophilic amino acids having a side chain pK value of greater than 7, which are typically positively charged at physiological pH. Basic amino acids include histidine (His or H), arginine (Arg or R), and lysine (Lys or K). By the term “neutral amino acid” (also “polar amino acid”), it is meant hydrophilic amino acids having a side chain that is uncharged at physiological pH, but which has at least one bond in which the pair of electrons shared in common by two atoms is held more closely by one of the atoms. Polar amino acids include serine (Ser or S), threonine (Thr or T), cysteine (Cys or C), tyrosine (Tyr or Y), asparagine (Asn or N), and glutamine (Gln or Q). The term “hydrophobic amino acid” (also “non-polar amino acid”) is meant to include amino acids exhibiting a hydrophobicity of greater than zero according to the normalized consensus hydrophobicity scale of Eisenberg (1984). Hydrophobic amino acids include proline (Pro or P), isoleucine (He or I), phenylalanine (Phe or F), valine (Val or V), leucine (Leu or L), tryptophan (Trp or W), methionine (Met or M), alanine (Ala or A), and glycine (Gly or G). “Acidic amino acid” refers to hydrophilic amino acids having a side chain pK value of less than 7, which are typically negatively charged at physiological pH. Acidic amino acids include glutamate (Glu or E), and aspartate (Asp or D).

[0110] Sequence identity is used to evaluate the similarity of two sequences; it is determined by calculating the percent of residues that are the same when the two sequences are aligned for maximum correspondence between residue positions. Any known method may be used to calculate sequence identity; for example, computer software is available to calculate sequence identity. Without wishing to be limiting, sequence identity can be calculated by software such as NCBI BLAST2, BLAST-P, BLAST-N, COBALT or FASTA-N, or any other appropriate software/tool that is known in the art (Johnson M, et al. (2008) Nucleic Acids Res. 36:W5-W9; Papadopoulos J S and Agarwala R (2007) Bioinformatics 23:1073-79).

[0111] The substantially identical sequences of the present invention may be at least 75% identical; in another example, the substantially identical sequences may be at least 80, 85, 90, 95, 96, 97, 98 or 99% identical at the amino acid level to sequences described herein. The substantially identical sequences retain substantially the activity and specificity of the reference sequence.

### Nucleic Acids, Host Cells

[0112] The present invention also relates to nucleic acids comprising nucleotide sequences encoding the above-mentioned enzymes. The nucleic acid may be codon-optimized. The nucleic acid can be a DNA or an RNA. The nucleic acid sequence can be deduced by the skilled artisan on the basis of the disclosed amino acid sequences. In a specific embodiment, the nucleic acid encodes one of the amino acid sequences as presented in any one of FIGS. 13 to 17 (orthologues and/or consensuses). In another specific embodiment, the nucleic acid for one or more enzymes is as shown in FIG. 13.

[0113] The present invention also encompasses vectors (plasmids) comprising the above-mentioned nucleic acids. The vectors can be of any type suitable, e.g., for expression of said polypeptides or propagation of genes encoding said polypeptides in a particular organism. The organism may be of eukaryotic or prokaryotic origin (e.g., yeast). The specific choice of vector depends on the host organism and is known to a person skilled in the art. In an embodiment, the vector comprises transcriptional regulatory sequences or a promoter operably-linked to a nucleic acid comprising a sequence encoding an enzyme involved in the BIA pathway of the invention. A first nucleic acid sequence is “operably-linked” with a second nucleic acid sequence when the first nucleic acid sequence is placed in a functional relationship with the second nucleic acid sequence. For instance, a promoter is operably-linked to a coding sequence if the promoter affects the transcription or expression of the coding sequence. Generally, operably-linked DNA sequences are contiguous and, where necessary to join two protein coding regions, in reading frame. However, since for example enhancers generally function when separated from the promoters by several kilobases and intronic sequences may be of variable lengths, some polynucleotide elements may be operably-linked but not contiguous. “Transcriptional regulatory sequences” or “transcriptional regulatory elements” are generic terms that refer to DNA sequences, such as initiation and termination signals (terminators), enhancers, and promoters, splicing signals, polyadenylation signals, etc., which induce or control transcription of protein coding sequences with which they are operably-linked.

[0114] Plasmids useful to express the enzymes of the present invention include the modified centromeric plasmids pGREG503 (FIG. 13, SEQ ID NO: 1), pGREG504 (FIG. 13, SEQ ID NO: 2), pGREG505 (FIG. 13, SEQ ID NO: 3) and pGREG506 (FIG. 13, SEQ ID NO: 4) from the pGREG series⁵⁵, the 2μ plasmids pYES2 (Invitrogen) (FIG. 13, SEQ ID NO: 5), pESC-leu2 derivative pESC-leu2d (Erhart E. and Hollenberg C. P., J. Bacteriol 1983, p 625) (FIG. 13, SEQ ID NO: 6), pGC550 (SEQ ID NO: 556), pGC552 (SEQ ID NO: 557), pGC1322 (SEQ ID NO: 558), pBOT-TRP (SEQ ID NO: 561), pBOT-URA (SEQ ID NO: 562), pBOT-HIS (SEQ ID NO: 563) and pBOT-LEU (SEQ ID NO: 564). Yeast Artificial Chromosome (YACs) able to clone fragments of 100-1000 kpb could also be used to express multiple enzymes (e.g., 10). Many other useful yeast expression vectors, either autonomously replicating low copy-number vectors (YCp or centromeric) or autonomously replicating high copy-number vectors (YEp or 2μ) are commercially available, e.g., from Invitrogen (www.lifetechnologies.com), the American Type Culture Collection (ATCC; www.atcc.org) or the Euroscarf collection (http://web.uni-frankfurt.deffb15/mikro/euroscarf/).

[0115] Plasmids including enzymes in accordance with specific embodiments of the present invention include pGC1189 (CPR); pGC1190 (CPRb-CFS); pGC1191(CPRb-SPSΔNb); pGC1062 (Block 1) (FIG. 13, SEQ ID NO: 7); pGC994 (Block 2) (FIG. 13, SEQ ID NO: 8); pGC997 (Block 3) (FIG. 13, SEQ ID NO: 9); pGC557 (CPR) (FIG. 13, SEQ ID NO: 10); pGC655 (BBEΔN-2μ) (FIG. 13, SEQ ID NO: 11); pGC717 (CPR-TNMT); and pBOT-TRP-(EX41-105), etc. as shown in Table 1. Plasmids in accordance with the present invention may also include nucleic acid molecule(s) encoding one or more of the polypeptides as shown in FIGS. 13 to 17 (orthologues or consensuses).

[0116] Promoters useful to express the enzymes of the present invention include the constitutive promoters from the following S. cerevisiae CEN.PK2-1 D genes: glyceraldehyde-3-phosphate dehydrogenase 3 (P_{TDH3}) (FIG. 13, SEQ ID NO: 12), fructose 1,6-bisphosphate aldolase (P_{FBA1}) (FIG. 13, SEQ ID NO: 13), pyruvate decarboxylase 1 (P_{PDC1}) (FIG. 13, SEQ ID NO: 14) and plasma membrane H⁺-ATPase 1 (P_{PMA1}) (FIG. 13, SEQ ID NO: 15). The inducible promoters from galactokinase (P_{GAL1}) (FIG. 13, SEQ ID NO: 16), UDP-glucose-4-epimerase (P_{GAL10}) (FIG. 13, SEQ ID NO: 17) from pESC-leu2d are also useful for the present invention. For example, they were used for the first characterization of PsCFS and PsSPS. The present invention also encompasses using other available promoters (e.g., yeast promoters), with different strengths and different expression profiles. Examples are the P_{TEF1} (FIG. 13, SEQ ID NO: 18) and P_{TEF2} (FIG. 13, SEQ ID NO: 19) promoters from the translational elongation factor EF-1 alpha paralogs TEF1 and TEF2; promoters of gene coding for enzymes involved in glycolysis such as 3-phosphoglycerate kinase (P_{PGK1}) (FIG. 13, SEQ ID NO: 20), pyruvate kinase (P_{PYK1}) (FIG. 13, SEQ ID NO: 21), triose-phosphate isomerase (P_{TPI1}) (FIG. 3, SEQ ID NO: 22), glyceraldehyde-3-phosphate dehydrogenase (P_{TDH2}) (FIG. 13, SEQ ID NO: 23), enolase II (P_{ENO2}) (FIG. 13, SEQ ID NO: 24) or hexose transporter 9 (P_{HXT9}) (FIG. 13, SEQ ID NO: 25). Other useful promoters in accordance with the present invention encompass those found through the promoter database of S. cerevisiae (http://rulai.cshl.edu/cgi-bin/SCPD/getgenelist).

[0117] Terminators useful for the present invention include terminators from the following S. cerevisiae CEN.PK2_1 D genes: cytochrome C1 (T_{CYC1}) (FIG. 13, SEQ ID NO: 26), alcohol dehydrogenase 1 (T_{ADH1}) (FIG. 13, SEQ ID NO: 27), phosphoglucoisomerase 1 glucose-6-phosphate isomerase (T_{PGI1}) (FIG. 13, SEQ ID NO: 28). The present invention also encompasses using other suitable yeast terminators, e.g., terminators from genes encoding for enzymes involved in glycolysis and gluconeogenesis such as alcohol dehydrogenase 1 (T_{ADH2}) (FIG. 13, SEQ ID NO: 29), enolase II (T_{EN02}) (FIG. 13, SEQ ID NO: 30), fructose 1,6-bisphosphate aldolase (T_{FBA1}) (FIG. 13, SEQ ID NO: 31), glyceraldehyde-3-phosphate dehydrogenase (T_{TDH2}) (FIG. 13, SEQ ID NO: 32) and triose-phosphate isomerase (T_{TPI1}) (FIG. 13, SEQ ID NO: 33). Other useful terminators in accordance with the present invention encompass those found from genes indicated in the promoter database of S. cerevisiae (http://rulai.cshl.edu/cgi-bin/SCPD/getgenelist).

[0118] The term “heterologous coding sequence” refers herein to a nucleic acid molecule that is not normally produced by the host cell in nature.

[0119] The terms “benzylisoquinoline alkaloid metabolite” or “BIA metabolite” as used herein refer to any BIA metabolite produced by the host cells of the present invention when fed the relevant substrate. Such BIA metabolites include plant native (e.g., reticuline) and non-native metabolites (e.g., N-methylscoulerine and N-methylcheilanthifoline). Without being so limited, it includes (R,S)-6-O-methyl-norlaudanosoline, (R,S)-3′-hydroxy-N-methylcoclaurine, (R,S)-reticuline, (R)-reticuline, (S)-reticuline, (S)-scoulerine, (S)-cheilanthifoline, (S)-stylopine, (S)—N-cis-methylstylopine, protopine, 6-hydroxyprotopine, dihydrosanguinarine, sanguinarine, N-methylscoulerine, N-methylcheilanthifoline, racemic mixtures of any of these compounds and stereoisomers of any of these compounds.

[0120] A recombinant expression vector (plasmid) comprising a nucleic acid sequence of the present invention may be introduced into a cell, e.g., a host cell, which may include a living cell capable of expressing the protein coding region from the defined recombinant expression vector. Accordingly, the present invention also relates to cells (host cells) comprising the nucleic acid and/or vector as described above. The suitable host cell may be any cell of eukaryotic (e.g., yeast) or prokaryotic (bacterial) origin that is suitable, e.g., for expression of the enzymes or propagation of genes/nucleic acids encoding said enzyme. The eukaryotic cell line may be of mammalian, of yeast, or invertebrate origin. The specific choice of cell line is known to a person skilled in the art. The terms “host cell” and “recombinant host cell” are used interchangeably herein. Such terms refer not only to the particular subject cell, but also to the progeny or potential progeny of such a cell. Because certain modifications may occur in succeeding generations due to either mutation or environmental influences, such progeny(ies) may not, in fact, be identical to the parent cell, but are still included within the scope of the term as used herein. Vectors can be introduced into cells via conventional transformation or transfection techniques. The terms “transformation” and “transfection” refer to techniques for introducing foreign nucleic acid into a host cell, including calcium phosphate or calcium chloride co-precipitation, DEAE-dextran-mediated transfection, lipofection, electroporation, microinjection and viral-mediated transfection. Suitable methods for transforming or transfecting host cells can for example be found in Sambrook et al. (supra), Sambrook and Russell (supra) and other laboratory manuals. Methods for introducing nucleic acids into mammalian cells in vivo are also known, and may be used to deliver the vector DNA of the invention to a subject for gene therapy.

[0121] In a specific embodiment, the host cells can be a yeast or a bacteria (E. coli). In a more specific embodiment, it can be a Saccharomycetaceae such as a Saccharomyces, Pichia or Zygosaccharomyces. In a more specific embodiment, it can be a Saccharomyces. In a more specific embodiment, it can be a Saccharomyces cerevisiae (S. cerevisiae). Yeast is advantageous in that cytochrome P450 proteins, involved in certain steps in the BIA pathways, are able to fold properly into the endoplasmic reticulum membrane so that activity is maintained, as opposed to bacterial cells which lack such intracellular compartments. The present invention encompasses the use of yeast strains that are aploid, and contain auxotropies for selection that facilitate the manipulation with plasmid. Yeast strains that can be used in the invention include, but are not limited to, CEN.PK, S288C, W303, A363A and YPH499, strains derived from S288C (FY4, DBY12020, DBY12021, XJ24-249) and strains isogenic to S288C (FY1679, AB972, DC5). In specific examples, the yeast strain is any of CEN.PK2-1D (MATalpha ura3-52; trp1-289; leu2-3,112; his3Δ 1; MAL2-8^{C}; SUC2) or CEN.PK2-1C (MATa ura3-52; trp1-289; leu2-3,112; his3Δ 1; MAL2-8c; SUC2) or any of their single, double or triple auxotrophs derivatives. In a more specific embodiment, the yeast strain is any of the yeast strains listed in Table 1 or Table 2. In another specific embodiment, the particular strain of yeast cell is S288C (MATalpha SUC2 mal mel gal2 CUP1 flo1 flo8-1 hap1), which is commercially available. In another specific embodiment, the particular strain of yeast cell is W303.alpha (MAT.alpha.; his3-11,15 trp1-1 leu2-3 ura3-1 ade2-1), which is commercially available. The identity and genotype of additional examples of yeast strains can be found at EUROSCARF, available through the World Wide Web at web.uni-frankfurt.deffb15/mikro/euroscarf/col_index.html or through the Saccharomyces Genome Database (www.yeastgenome.org).

[0122] The above-mentioned nucleic acid or vector may be delivered to cells in vivo (to induce the expression of the enzymes and generates BIA metabolites in accordance with the present invention) using methods well known in the art such as direct injection of DNA, receptor-mediated DNA uptake, viral-mediated transfection or non-viral transfection and lipid based transfection, all of which may involve the use of gene therapy vectors. Direct injection has been used to introduce naked DNA into cells in vivo. A delivery apparatus (e.g., a “gene gun”) for injecting DNA into cells in vivo may be used. Such an apparatus may be commercially available (e.g., from BioRad). Naked DNA may also be introduced into cells by complexing the DNA to a cation, such as polylysine, which is coupled to a ligand for a cell-surface receptor. Binding of the DNA-ligand complex to the receptor may facilitate uptake of the DNA by receptor-mediated endocytosis. A DNA-ligand complex linked to adenovirus capsids which disrupt endosomes, thereby releasing material into the cytoplasm, may be used to avoid degradation of the complex by intracellular lysosomes.

### Methods of Preparing a Benzylisoquinoline Alkaloid (BIA) Metabolite

[0123] The present invention encompasses a method of using a host cell as described above expressing enzymes in accordance with the present invention for generating a significant yield of benzylisoquinoline alkaloid. The applicants have surprisingly discovered that by using first buffering conditions enabling the maintenance of a useful pH of over about 7, and, optionally, second buffering conditions between about 3 and about 6, the host cells of the present invention produced a significantly improved yield of BIA metabolite.

[0124] The present invention therefore provide a method of using a host cell as described above expressing enzymes in accordance with the present invention for generating a significant yield of benzylisoquinoline alkaloid using a first useful pH. As used herein, the terms “first useful pH” refer to a pH used for a first fermentation and refer to a pH of over about 7 (over about 7, 7.1, 7.2, 7.3, 7.4, 7.5, 7.6, 7.7, 7.8, 7.9 or 8, etc.), more preferably between about 7 (or about 7, 7.1, 7.2, 7.3, 7.4, 7.5, 7.6, 7.7, 7.8, 7.9 or 8, etc.) and about 10 (or about 9, 9.1, 9.2, 9.3, 9.4, 9.5, 9.6, 9.7, 9.8, 9.9 or 10), more preferably, about 7 (or about 7, 7.1, 7.2, 7.3, 7.4, 7.5, 7.6, 7.7, 7.8 or 7.9, etc.) to about 9 (or about 8, 8.1, 8.2, 8.3, 8.4, 8.5, 8.6, 8.7, 8.8, 8.9 or 9); about 7 to about 9.9; about 7 to about 9.8; about 7 to about 9.7; about 7 to about 9.6; about 7 to about 9.5; about 7 to about 9.4; about 7 to about 9.3; about 7 to about 9.2; about 7 to about 9.1; about 7.1 to about 8.9; about 7.1 to about 8.8; about 7.1 to about 8.7; about 7.1 to about 8.6; about 7.1 to about 8.5; about 7.1 to about 8.4; about 7.1 to about 8.3; about 7.1 to about 8.2; about 7.1 to about 8.1; about 7.2 to about 9.9; about 7.2 to about 9.8; about 7.2 to about 9.7; about 7.2 to about 9.6; about 7.2 to about 9.5; about 7.2 to about 9.4; about 7.2 to about 9.3; about 7.2 to about 9.2; about 7.2 to about 9.1; about 7.2 to about 8.9; about 7.2 to about 8.8; about 7.2 to about 8.7; about 7.2 to about 8.6; about 7.2 to about 8.5; about 7.2 to about 8.4; about 7.2 to about 8.3; about 7.2 to about 8.2; about 7.2 to about 8.1; about 7.2 to about 8.6; about 7.2 to about 8.5; about 7.2 to about 8.4; about 7.2 to about 8.3; about 7.2 to about 8.2; about 7.2 to about 8.1; about 7.2 to about 9.9; about 7.2 to about 9.8; about 7.2 to about 9.7; about 7.2 to about 9.6; about 7.2 to about 9.5; about 7.2 to about 9.4; about 7.2 to about 9.3; about 7.2 to about 9.2; about 7.2 to about 9.1; about 7.2 to about 8.9; about 7.2 to about 8.8; about 7.2 to about 8.7; about 7.2 to about 8.6; about 7.2 to about 8.5; about 7.2 to about 8.4; about 7.2 to about 8.3; about 7.2 to about 8.2; about 7.2 to about 8.1; about 7.3 to about 8.6; about 7.3 to about 8.5; about 7.3 to about 8.4; about 7.3 to about 8.3; about 7.3 to about 8.2; about 7.3 to about 8.1; about 7.3 to about 9.9; about 7.3 to about 9.8; about 7.3 to about 9.7; about 7.3 to about 9.6; about 7.3 to about 9.5; about 7.3 to about 9.4; about 7.3 to about 9.3; about 7.3 to about 9.2; about 7.3 to about 9.1; about 7.3 to about 8.9; about 7.3 to about 8.8; about 7.3 to about 8.7; about 7.3 to about 8.6; about 7.3 to about 8.5; about 7.3 to about 8.4; about 7.3 to about 8.3; about 7.3 to about 8.2; about 7.3 to about 8.1; about 7.4 to about 8.6; about 7.4 to about 8.5; about 7.4 to about 8.4; about 7.4 to about 8.3; about 7.4 to about 8.2; about 7.4 to about 8.1; about 7.4 to about 9.9; about 7.4 to about 9.8; about 7.4 to about 9.7; about 7.4 to about 9.6; about 7.4 to about 9.5; about 7.4 to about 9.4; about 7.4 to about 9.3; about 7.4 to about 9.2; about 7.4 to about 9.1; about 7.4 to about 8.9; about 7.4 to about 8.8; about 7.4 to about 8.7; about 7.4 to about 8.6; about 7.4 to about 8.5; about 7.4 to about 8.4; about 7.4 to about 8.3; about 7.4 to about 8.2; about 7.4 to about 8.1; about 7.5 to about 8.6; about 7.5 to about 8.5; about 7.5 to about 8.4; about 7.5 to about 8.3; about 7.5 to about 8.2; about 7.5 to about 8.1; about 7.5 to about 9.9; about 7.5 to about 9.8; about 7.5 to about 9.7; about 7.5 to about 9.6; about 7.5 to about 9.5; about 7.5 to about 9.4; about 7.5 to about 9.3; about 7.5 to about 9.2; about 7.5 to about 9.1; about 7.5 to about 8.9; about 7.5 to about 8.8; about 7.5 to about 8.7; about 7.5 to about 8.6; about 7.5 to about 8.5; about 7.5 to about 8.4; about 7.5 to about 8.3; about 7.5 to about 8.2; about 7.5 to about 8.1; about 7.6 to about 8.6; about 7.6 to about 8.5; about 7.6 to about 8.4; about 7.6 to about 8.3; about 7.6 to about 8.2; about 7.6 to about 8.1; about 7.6 to about 9.9; about 7.6 to about 9.8; about 7.6 to about 9.7; about 7.6 to about 9.6; about 7.6 to about 9.5; about 7.6 to about 9.4; about 7.6 to about 9.3; about 7.6 to about 9.2; about 7.6 to about 9.1; about 7.6 to about 8.9; about 7.6 to about 8.8; about 7.6 to about 8.7; about 7.6 to about 8.6; about 7.6 to about 8.5; about 7.6 to about 8.4; about 7.6 to about 8.3; about 7.6 to about 8.2; about 7.6 to about 8.1; about 7.7 to about 8.6; about 7.7 to about 8.5; about 7.7 to about 8.4; about 7.7 to about 8.3; about 7.7 to about 8.2; about 7.7 to about 8.1; about 7.7 to about 9.9; about 7.7 to about 9.8; about 7.7 to about 9.7; about 7.7 to about 9.6; about 7.7 to about 9.5; about 7.7 to about 9.4; about 7.7 to about 9.3; about 7.7 to about 9.2; about 7.7 to about 9.1; about 7.7 to about 8.9; about 7.7 to about 8.8; about 7.7 to about 8.7; about 7.7 to about 8.6; about 7.7 to about 8.5; about 7.7 to about 8.4; about 7.7 to about 8.3; about 7.7 to about 8.2; about 7.7 to about 8.1; about 7.8 to about 8.6; about 7.8 to about 8.5; about 7.8 to about 8.4; about 7.8 to about 8.3; about 7.8 to about 8.2; about 7.8 to about 8.1; about 7.8 to about 9.9; about 7.8 to about 9.8; about 7.8 to about 9.7; about 7.8 to about 9.6; about 7.8 to about 9.5; about 7.8 to about 9.4; about 7.8 to about 9.3; about 7.8 to about 9.2; about 7.8 to about 9.1; about 7.8 to about 8.9; about 7.8 to about 8.8; about 7.8 to about 8.7; about 7.8 to about 8.6; about 7.8 to about 8.5; about 7.8 to about 8.4; about 7.8 to about 8.3; about 7.8 to about 8.2; about 7.8 to about 8.1; about 7.9 to about 8.6; about 7.9 to about 8.5; about 7.9 to about 8.4; about 7.9 to about 8.3; about 7.9 to about 8.2; about 7.9 to about 8.1; about 7.9 to about 9.9; about 7.9 to about 9.8; about 7.9 to about 9.7; about 7.9 to about 9.6; about 7.9 to about 9.5; about 7.9 to about 9.4; about 7.9 to about 9.3; about 7.9 to about 9.2; about 7.9 to about 9.1; about 7.9 to about 8.9; about 7.9 to about 8.8; about 7.9 to about 8.7; about 7.9 to about 8.6; about 7.9 to about 8.5; about 7.9 to about 8.4; about 7.9 to about 8.3; about 7.9 to about 8.2; about 7.9 to about 8.1. As used herein, the terms “second useful pH” refer to the pH used for the optional second fermentation and refer to a pH of between about 2.7 and about 6.3 (e.g., YNB conditions), between about 2.8 and about 6.2, between about 2.9 and about 6.1, between about 3 and about 6.0, between about 3 and about 5.9, between about 3 and about 5.8, between about 3 and about 5.7, between about 3 and about 5.6, between about 3 and about 5.5.

[0125] Without being so limited, useful buffering conditions capable of maintaining a pH of about 7 to about 10 include: a buffer or mixture of buffers such as Tris; yeast growing medium (e.g., yeast nitrogen broth, synthetic dropout supplement, 2% α-D-glucose and amino acids) (YNB); YNB and a sufficient concentration of Tris; YNB and HEPES; Tris; and Tris and EDTA. Additional examples of such buffers are PBS, PIPES, MOPS, and taurine. A more exhaustive list can be found online at http://www.sigmaaldrich.com/life-science/core-bioreagents/biological-buffers/learning-center/buffer-reference-center.html. In a specific embodiment, such conditions include using about 5 mM to about 150 mM of Tris or Tris and EDTA. In a more specific embodiment, the range is of about 10 to 150 mM; 10 to 140 mM; 10 to 130 mM; 10 to 120 mM; 10 to 110 mM; 10 to 100 mM; 10 to 90 mM; 10 to 80 mM; 10 to 70 mM; 10 to 60 mM; 10 to 55 mM; 10 to 50 mM; 20 to 150 mM; 20 to 140 mM; 20 to 130 mM; 20 to 120 mM; 20 to 110 mM; 20 to 100 mM; 20 to 90 mM; 20 to 80 mM; 20 to 70 mM; 20 to 60 mM; 20 to 55 mM; 20 to 50 mM; 30 to 150 mM; 30 to 140 mM; 30 to 130 mM; 30 to 120 mM; 30 to 110 mM; 30 to 100 mM; 30 to 90 mM; 30 to 80 mM; 30 to 70 mM; 30 to 60 mM; 30 to 55 mM; 30 to 50 mM; 40 to 150 mM; 40 to 140 mM; 40 to 130 mM; 40 to 120 mM; 40 to 110 mM; 40 to 100 mM; 40 to 90 mM; 40 to 80 mM; 40 to 70 mM; 40 to 60 mM; 40 to 55 mM; 40 to 50 mM; 45 to 150 mM; 45 to 140 mM; 45 to 130 mM; 45 to 120 mM; 45 to 110 mM; 45 to 100 mM; 45 to 90 mM; 45 to 80 mM; 45 to 70 mM; 45 to 60 mM; 45 to 55 mM; or 45 to 50 mM.

[0126] In one embodiment, the method comprising incubating (R,S)-norlaudanosoline (fed substrate) with a host cell expressing 6OMT, CNMT and 4′OMT2 in buffering conditions enabling a useful pH (namely in that case a pH of about 8) yielded about 20% of (S)-reticuline. As used herein the yield may be defined as the ratio of the end product (metabolite) produced to the fed substrate. Hence 20% of the total fed (R,S)-norlaudanosoline was converted to (S)-reticuline in the host cell combined supernatant and cell extract. In another embodiment, the method comprising incubating (S)-scoulerine (fed substrate) with a host cell expressing BBE, CFS, SPS and CPR in buffering conditions enabling a useful pH (namely in that case a pH of about 8) yielded about 19% of (S)-stylopine. In another embodiment, the method comprising incubating (S)-stylopine (fed substrate) with a host cell expressing TNMT, MSH, P6H and CPR in buffering conditions enabling a useful pH (namely in that case a pH of about 8) yielded about 57% of dihydrosanguinarine. In another embodiment, the method comprising incubating (S)-scoulerine (fed substrate) with a host cell expressing BBE, CFS, SPS, TNMT, MSH, P6H and CPR in buffering conditions enabling a useful pH (namely in that case a pH of about 8) yielded about 7.5% of dihydrosanguinarine. In another embodiment, the method comprising incubating (R,S)-norlaudanosoline (fed substrate) with a host cell expressing 6OMT, CNMT, 4′OMT2, BBE, CFS, SPS, TNMT, MSH, P6H and CPR in buffering conditions enabling a useful pH (namely in that case a pH of about 8) yielded about 1.5% of dihydrosanguinarine. As used herein, a significant yield of BIA metabolite includes about 1.5% or more. In another embodiment, the method comprising incubating scoulerine (fed substrate) with a host expressing a Ring A closer and A Ring B closer (see FIGS. 12A-B) generated yields of more than 95% stylopine.

[0127] The present invention is illustrated in further details by the following non-limiting examples.

### Example 1

### Methods

### Chemicals and Reagents

[0128] (S)-Reticuline was a gift from Johnson & Johnson. (R,S)-Norlaudanosoline was purchased from Enamine Ltd. (Kiev, Ukraine), (S)-scoulerine and (S)-stylopine from ChromaDex (Irvine, Calif., USA), protopine from TRC Inc. (North York, Ontario, Canada) and sanguinarine from Sigma. Dihydrosanguinarine was prepared by NaBH₄ reduction of sanguinarine⁵⁰. Antibiotics, growth media and α-D-glucose were purchased from Sigma-Aldrich. Restriction enzymes, T4 DNA polymerase, and T4 DNA ligase were from New England Biolabs (NEB). Polymerase chain reactions (PCRs) for the assembly of expression cassettes were performed using Phusion™ High-Fidelity DNA polymerase (NEB/Thermo Scientific). Taq polymerase (Fermentas/Thermo Scientific) was used in PCRs confirming DNA assembly or chromosomal integration. PCR-amplified products were gel purified using the QIAquick™ purification kit (Qiagen). Plasmid extractions were done using the GeneJET™ plasmid mini-prep kit (Thermo Scientific). Genomic DNA preparations were done using the DNeasy™ blood and tissue kit (Qiagen). HPLC-grade water was purchased from Fluke. HPLC-grade methanol and acetonitrile were purchased from Fischer Scientific.

### Identification and Characterization of PsCFS and PsSPS

[0129] RNA extraction from root or stems of the Papaver somniferum (opium poppy) cultivar Bea's Choice, cDNA library construction, Illumine sequencing, sequence assembly and annotation, and gene expression analysis were performed as described previously⁶.

[0130] The pESC-CPR vector encoding opium poppy cytochrome P450 reductase (PsCPR) fused to a c-Myc tag was used for the heterologous expression of plant proteins in S. cerevisiae²⁵. The native PsCPR sequence and that optimized for the host are shown in FIG. 13. PsCFS (CYP719A25; GenBank ADB89213) was amplified from opium poppy cell culture cDNA using the primer listed in Table 3. The amplicon was inserted into NotI and SpeI restriction sites of pESC-CPR in-frame with a FLAG-tag sequence yielding pESC-CPR/CFS. A synthetic SPS (CYP719A20) gene (GenBank KF481962), codon-optimized (SEQ ID NO: 55) (PsSPSΔN) for expression in S. cerevisiae and containing a sequence encoding the N-terminal membrane-spanning domain from the Lactuca sativa (lettuce) germacrene A oxidase (43 amino acids)⁵¹ replacing the corresponding native domain (29 amino acids) to increase protein stability⁵² (recombinant psSPSΔN), was inserted into the NotI and SpeI restriction sites of pESC-CPR²⁵ in-frame with a FLAG-tag sequence yielding pESC-CPR/SPSΔN. Heterologous gene expression in S. cerevisiae strain YPH499, the preparation of microsomes and cytochrome P450 enzyme assays were performed as described previously²⁵. Substrate concentrations in enzyme assays were 125 μM for (S)-scoulerine and 500 μM for NADPH.

Reconstitution of the Sanguinarine Pathway in S. cerevisiae

[0131] For liquid cultures, S. cerevisiae was grown in yeast nitrogen broth, synthetic dropout supplement, 2% α-D-glucose and amino acids as appropriate (YNB-DO-GLU) at 30° C. and 200 rpm. For solid media, selection for plasmid transformation was on YNB-DO-GLU/agar, while selection for chromosomal integration was on YPD/agar (yeast extract peptone-dextrose) with the appropriate antibiotic. Lithium acetate transformation was performed according to Gietz and Schiestl⁵³, electroporation was performed according to Shao et al⁹.

[0132] Coding sequences for 6OMT, CNMT, 4′OMT2, BBE, CFS, SPS, TNMT, MSH AND CPR are from P. somniferum and that of P6H is from Eschscholzia californica. Coding sequences for protoberberine Ring A and Ring B closers are from various species as listed in Table 6. Synthetic sequences of Ps6OMT (GenBank KF554144), PsCNMT (GenBank KF661326), Ps4′OMT2 (GenBank KF661327), PsSPSΔN and PsP450R(CPR) (GenBank KF661328) were codon-optimized by DNA2.0 for optimal expression in yeast (See FIG. 13, SEQ ID NOs: 34-35, 38-39, 54-55; and 64-65, respectively). The lettuce germacrene A oxidase N-terminus membrane-spanning domain was incorporated into N-truncated P. somniferum stylopine synthase (SPS) as described above for stylopine synthase. Twenty-three amino acids were truncated from N-terminus of the opium poppy BBE, resulting in a truncated version of BBE (PsBBEΔN)^{22,54} (See corresponding sequences in FIG. 13, SEQ ID NOs: 46-47). When not otherwise specified, coding sequences in Table 1 and Table 2 correspond to the plant cDNA sequences. The partial Kozak sequence AAAACA (SEQ ID NO: 482) was introduced upstream of all coding sequences by PCR or as an integral part of gene synthesis.

TABLE 1
List of Saccharomyces cerevisiae strains and plasmids used herein. Full genotypes are available in Table 2

| Strain | Plasmid(s) | Brief description of genotype |
|---|---|---|
| GCY1192 | pGC1189 | MATa leu2-Δ1 |
| GCY1193 | pGC1190 | MATa leu2-Δ1 |
| GCY1194 | pGC1191 | MATa leu2-Δ1 |
| GCY1086 | pGC1062 (Block 1) | MATα leu2-3 |
| GCY1090 | pGC557 (CPR) (SEQ ID NO: 10) | MATα trp1-289 his3 Δ1 |
| | pGC994 (Block 2) (SEQ ID NO: 8) | |
| GCY1094 | pGC557 (CPR) (SEQ ID NO: 10) | MATα ura3-52 his3 Δ1 |
| | pGC997 (Block 3) (SEQ ID NO: 9) | |
| GCY1098 | pGC557 (CPR) (SEQ ID NO: 10) | MATα ura3-52 trp1-289 leu2-3, 112 his3 Δ1 |
| | pGC1062 (Block 1) (SEQ ID NO: 7) | |
| | pGC994 (Block 2) (SEQ ID NO: 8) | |
| | pGC997 (Block 3) (SEQ ID NO: 9) | |
| GCY1101 | pGC557 (CPR) (SEQ ID NO: 10) | Block 2 integrant. MATα ura3-52 trp1-289 leu2- |
| | | 3, 112 his3 Δ1 |
| GCY1104 | pGC557 (CPR) (SEQ ID NO: 10) | Block 2 and 3 integrant. MATα ura3-52 trp1-289 |
| | | leu2-3, 112 his3 Δ1 |
| GCY1108 | pGC557 (CPR) (SEQ ID NO: 10) | Block 2 and 3 integrant. MATα ura3-52 trp1-289 |
| | pGC1062 (Block 1) (SEQ ID NO: 7) | leu2-3, 112 his3 Δ1 |
| GCY1125 | pGC557 (CPR) (SEQ ID NO: 10) | Block 2 and 3 integrant. MATα ura3-52 trp1-289 |
| | pGC1062 (Block 1) (SEQ ID NO: 7) | leu2-3, 112 his3 Δ1 |
| | pGC655 (BBEΔN-2μ) (SEQ ID NO: | |
| | 11) | |
| GCY1127 | pGC717 (CPR-TNMT) | |
| GCY1333 | None | CPR integrant. MATα ura3-52 trp1-289 leu2-3, 112 |
| | | his3 Δ1 |
| GCY1270 | None | CPR and TNMT integrant. MATα ura3-52 trp1-289 |
| | | leu2-3, 112 his3 Δ1 |
| GCY1301 | pGC550 (SOMT + CAS) | CPR and TNMT integrant. MATα ura3-52 trp1-289 |
| | | leu2-3, 112 his3 Δ1 |
| GCY1316 | None | CPR and CFS integrant. MATα ura3-52 trp1-289 |
| | | leu2-3, 112 his3 Δ1 |
| GCY1411 | pGC552 (PsCFS) | CPR integrant. MATα ura3-52 trp1-289 leu2-3, 112 |
| | | his3 Δ1 |
| GCY1412 | pGC1322 (PsSPSΔN) | CPR integrant. MATα ura3-52 trp1-289 leu2-3, 112 |
| | | his3 Δ1 |
| GCY1413 | pGC552 (PsCFS) | CPR integrant. MATα ura3-52 trp1-289 leu2-3, 112 |
| | pGC1322 (PsSPSΔN) | his3 Δ1 |
| GCY1414 | pGC1322 (PsSPSΔN) | CPR and CFS integrant. MATα ura3-52 trp1-289 |
| | | leu2-3, 112 his3 Δ1 |
| GCY1415 | pGC552 (PsCFS) | CPR and TNMT integrant. MATα ura3-52 trp1-289 |
| | | leu2-3, 112 his3 Δ1 |
| GCY1416 | pGC1322 (PsSPSΔN) | CPR and TNMT integrant. MATα ura3-52 trp1-289 |
| | | leu2-3, 112 his3 Δ1 |
| GCY1417 | pGC552 (PsCFS) | CPR and TNMT integrant. MATα ura3-52 trp1-289 |
| | pGC1322 (PsSPSΔN) | leu2-3, 112 his3 Δ1 |
| SF1333-EX₍ₙ₎ | pBOT-TRP EX₍ₙ₎ (41-105) | CPR integrant. MATα ura3-52 trp1-289 leu2-3, 112 |
| | | his3 Δ1 |
| SF1333-LEU-EX₍ₙ₎ | pBOT-LEU-EX₍ₙ₎ (54, 98) | CPR integrant. MATα ura3-52 trp1-289 leu2-3, 112 |
| | | his3 Δ1 |
| SF1316-EX₍ₙ₎ | pBOT-TRP-EX₍ₙ₎ (41-105) | CPR and CFS integrant. MATα ura3-52 trp1-289 |
| | | leu2-3, 112 his3 Δ1 |
| SF1270-EX_{(n1, n2)} | pBOT-TRP-EX₍ₙ₁₎ or none | CPR and TNMT integrant. MATα ura3-52 trp1-289 |
| | pBOT-LEU-EX₍ₙ₂₎ or none | leu2-3, 112 his3 Δ1 |

| Plasmid | Brief description of genotype ^{a} |
|---|---|
| pGC1189 | CPR^{b} |
| pGC1190 | CPR^{b}-CFS |
| pGC1191 | CPR^{b}-SPSΔN^{b} |
| pGC1062 (Block 1) (SEQ ID NO: 7) | 6OM^{b}-4′OMT2^{b}-CNMT^{b} |
| pGC994 (Block 2) (SEQ ID NO: 8) | CFS-BBEΔN-recombinant psSPSΔN^{b} |
| pGC997 (Block 3) (SEQ ID NO: 9) | P6H-MSH-TNMT |
| pGC557 (CPR) (SEQ ID NO: 10) | CPR^{b} |
| pGC655 (BBEΔN-2μ) (SEQ ID NO: 11) | BBEΔN |
| pGC717 | CPR^{b}-TNMT |
| pGC550 | SOMT-CAS |
| pGC552 | CFS |
| pGC1322 | SPSΔN |
| EX₍ₙ₎ | CYP719 (numbers span from 41-105) |
| LEU-EX₍ₙ₎ | CYP719 (either 54 or 98) |

^{a} All coding sequences are from Papaver somniferum except PH6 which is from Eschscholzia californica
^{b}Synthetic gene. Codon-optimized sequence for expression in Saccharomyces cerevisiae.

TABLE 2
List of Saccharomyces cerevisiae strains and plasmids used the examples presented herein

| Strain | Genotype ^{a, c} | Plasmid | Source |
|---|---|---|---|
| YPH499 | MATa ura3-52 lys2-801_amber ade2-101_ochre trp1- | None | [57, 58] |
| | Δ63 his3-Δ200 leu2-Δ1 | | |
| GCY1192 | YPH499 | pGC1189 | This Application |
| GCY1193 | YPH499 | pGC1190 | This Application |
| GCY1194 | YPH499 | pGC1191 | This Application |
| CEN.PK113-16B | MATα leu2-3 MAL2-8C SUC2 | None | [59] |
| CEN.PK113-16C | MATα trp1-289 his3 Δ1 MAL2-8C SUC2 | None | [59] |
| CEN.PK113-3B | MATα ura3-52 his3 Δ1 MAL2-8C SUC2 | None | [59] |
| CEN.PK2-1D | MATα ura3-52 trp1-289 leu2-3, 112 his3 Δ1 MAL2-8C | None | [59] |
| | SUC2 | | |
| GCY1086 | CEN.PK113-16B | pGC1062 | This Application |
| GCY1090 | CEN.PK113-16C | pGC994, pGC557 | This Application |
| GCY1094 | CEN.PK113-3B | pGC997, pGC557 | This Application |
| GCY1098 | CEN.PK2-1D | pGC1062, pGC994, | This Application |
| | | pGC997, pGC557 | |
| GCY1074 | CEN.PK2-1D YORWΔ17(ChrXV)::C1-P_{TDH3}-CFS-T_{CYC1}- | None | This Application |
| | C6-H1-C1-P_{PDC1}-BBEΔN-T_{ADH1}-C6-H2-C1-P_{PMA1}- | | |
| | SPSΔN^{b}-T_{PGI1}-C6 | | |
| GCY1101 | GCY1074 (Block 2 integrant) | pGC557 (CPR) | This Application |
| GCY1082 | YPRCΔ15(ChrXVI)::C1-P_{PDC1}-P6H-T_{CYC1}-C6-H1-C1- | None | This Application |
| | P_{TDH3}-MSH-T_{ADH1}-C6-C1-P_{FBA1}-TNMT-T_{PGI1}-C6 with | | |
| | pGC557 | | |
| GCY1104 | GCY1082 (Block 2 and 3 integrant) | pGC557 (CPR) | This Application |
| GCY1108 | GCY1082 (Block 2 and 3 integrant) | pGC1062 (Block1) | This Application |
| | | pGC557 (CPR) | |
| GCY1125 | GCY1082 (Block 2 and 3 integrant) | pGC1062 (Block1) | This Application |
| | | pGC557 (CPR) | |
| | | pGC655 (BBE-2μ) | |
| GCY1127 | GCY1074 (Block 2 integrant) | pGC717 | This Application |
| | | (TNMT + CPR) | |
| GCY1333 | CEN.PK2-1D YNRCΔ9 (ChrXIV)::C1-P_{TDH3}-CPR-T_{CYC1}-C6 | None | This application |
| GCY1270 | CEN.PK2-1D YORWΔ17(ChrXV)::C1-P_{FBA1}-CPR-T_{CYC1}- | None | This application |
| | C6-H1-C1-P_{TDH3}-TNMT-T_{ADH1}-C6 | | |
| GCY1301 | GCY1300 | pGC550 | This application |
| | | (SOMT + CAS) | |
| GCY1316 | CEN.PK2-1D YNRCΔ9 (ChrXIV)::C1-P_{TDH3}-CPR-T_{CYC1}-C6 | None | This application |
| | YORWΔ17(ChrXV)::C1-P_{TDH3}-CFS-T_{CYC1}-C6 | | |
| GCY1411 | GCY1333 (CPR integrant) | pGC552 | This application |
| GCY1412 | GCY1333 (CPR integrant) | pGC1322 | This application |
| SF1333-EX41 | GCY1333 (CPR integrant) | pBOT-TRP-EX41 | This application |
| SF1333-EX42 | GCY1333 (CPR integrant) | pBOT-TRP-EX42 | This application |
| SF1333-EX43 | GCY1333 (CPR integrant) | pBOT-TRP-EX43 | This application |
| SF1333-EX44 | GCY1333 (CPR integrant) | pBOT-TRP-EX44 | This application |
| SF1333-EX45 | GCY1333 (CPR integrant) | pBOT-TRP-EX45 | This application |
| SF1333-EX46 | GCY1333 (CPR integrant) | pBOT-TRP-EX46 | This application |
| SF1333-EX47 | GCY1333 (CPR integrant) | pBOT-TRP-EX47 | This application |
| SF1333-EX48 | GCY1333 (CPR integrant) | pBOT-TRP-EX48 | This application |
| GCY1411 | GCY1333 (CPR integrant) | pGC552 | This application |
| SF1333-EX50 | GCY1333 (CPR integrant) | pBOT-TRP-EX50 | This application |
| SF1333-EX51 | GCY1333 (CPR integrant) | pBOT-TRP-EX51 | This application |
| SF1333-EX52 | GCY1333 (CPR integrant) | pBOT-TRP-EX52 | This application |
| SF1333-EX53 | GCY1333 (CPR integrant) | pBOT-TRP-EX53 | This application |
| SF1333-EX54 | GCY1333 (CPR integrant) | pBOT-TRP-EX54 | This application |
| SF1333-EX55 | GCY1333 (CPR integrant) | pBOT-TRP-EX55 | This application |
| SF1333-EX56 | GCY1333 (CPR integrant) | pBOT-TRP-EX56 | This application |
| SF1333-EX57 | GCY1333 (CPR integrant) | pBOT-TRP-EX57 | This application |
| SF1333-EX58 | GCY1333 (CPR integrant) | pBOT-TRP-EX58 | This application |
| SF1333-EX59 | GCY1333 (CPR integrant) | pBOT-TRP-EX59 | This application |
| SF1333-EX60 | GCY1333 (CPR integrant) | pBOT-TRP-EX60 | This application |
| SF1333-EX61 | GCY1333 (CPR integrant) | pBOT-TRP-EX61 | This application |
| SF1333-EX63 | GCY1333 (CPR integrant) | pBOT-TRP-EX63 | This application |
| SF1333-EX64 | GCY1333 (CPR integrant) | pBOT-TRP-EX64 | This application |
| SF1333-EX65 | GCY1333 (CPR integrant) | pBOT-TRP-EX65 | This application |
| SF1333-EX66 | GCY1333 (CPR integrant) | pBOT-TRP-EX66 | This application |
| SF1333-EX67 | GCY1333 (CPR integrant) | pBOT-TRP-EX67 | This application |
| SF1333-EX68 | GCY1333 (CPR integrant) | pBOT-TRP-EX68 | This application |
| SF1333-EX69 | GCY1333 (CPR integrant) | pBOT-TRP-EX69 | This application |
| SF1333-EX70 | GCY1333 (CPR integrant) | pBOT-TRP-EX70 | This application |
| SF1333-EX71 | GCY1333 (CPR integrant) | pBOT-TRP-EX71 | This application |
| SF1333-EX72 | GCY1333 (CPR integrant) | pBOT-TRP-EX72 | This application |
| SF1333-EX73 | GCY1333 (CPR integrant) | pBOT-TRP-EX73 | This application |
| SF1333-EX74 | GCY1333 (CPR integrant) | pBOT-TRP-EX74 | This application |
| SF1333-EX75 | GCY1333 (CPR integrant) | pBOT-TRP-EX75 | This application |
| SF1333-EX76 | GCY1333 (CPR integrant) | pBOT-TRP-EX76 | This application |
| SF1333-EX77 | GCY1333 (CPR integrant) | pBOT-TRP-EX77 | This application |
| SF1333-EX79 | GCY1333 (CPR integrant) | pBOT-TRP-EX79 | This application |
| SF1333-EX80 | GCY1333 (CPR integrant) | pBOT-TRP-EX80 | This application |
| SF1333-EX81 | GCY1333 (CPR integrant) | pBOT-TRP-EX81 | This application |
| SF1333-EX82 | GCY1333 (CPR integrant) | pBOT-TRP-EX82 | This application |
| SF1333-EX83 | GCY1333 (CPR integrant) | pBOT-TRP-EX83 | This application |
| SF1333-EX84 | GCY1333 (CPR integrant) | pBOT-TRP-EX84 | This application |
| SF1333-EX85 | GCY1333 (CPR integrant) | pBOT-TRP-EX85 | This application |
| SF1333-EX86 | GCY1333 (CPR integrant) | pBOT-TRP-EX86 | This application |
| SF1333-EX87 | GCY1333 (CPR integrant) | pBOT-TRP-EX87 | This application |
| SF1333-EX88 | GCY1333 (CPR integrant) | pBOT-TRP-EX88 | This application |
| SF1333-EX89 | GCY1333 (CPR integrant) | pBOT-TRP-EX89 | This application |
| SF1333-EX90 | GCY1333 (CPR integrant) | pBOT-TRP-EX90 | This application |
| SF1333-EX91 | GCY1333 (CPR integrant) | pBOT-TRP-EX91 | This application |
| SF1333-EX92 | GCY1333 (CPR integrant) | pBOT-TRP-EX92 | This application |
| SF1333-EX93 | GCY1333 (CPR integrant) | pBOT-TRP-EX93 | This application |
| SF1333-EX95 | GCY1333 (CPR integrant) | pBOT-TRP-EX95 | This application |
| SF1333-EX96 | GCY1333 (CPR integrant) | pBOT-TRP-EX96 | This application |
| SF1333-EX97 | GCY1333 (CPR integrant) | pBOT-TRP-EX97 | This application |
| SF1333-EX98 | GCY1333 (CPR integrant) | pBOT-TRP-EX98 | This application |
| SF1333-EX99 | GCY1333 (CPR integrant) | pBOT-TRP-EX99 | This application |
| SF1333-EX100 | GCY1333 (CPR integrant) | pBOT-TRP-EX100 | This application |
| SF1333-EX101 | GCY1333 (CPR integrant) | pBOT-TRP-EX101 | This application |
| SF1333-EX102 | GCY1333 (CPR integrant) | pBOT-TRP-EX102 | This application |
| SF1333-EX103 | GCY1333 (CPR integrant) | pBOT-TRP-EX103 | This application |
| SF1333-EX104 | GCY1333 (CPR integrant) | pBOT-TRP-EX104 | This application |
| SF1333-EX105 | GCY1333 (CPR integrant) | pBOT-TRP-EX105 | This application |
| GCY1413 | GCY1333 (CPR integrant) | pGC1322 pGC552 | This application |
| SF1333- | GCY1333 (CPR integrant) | pGC1322 | This application |
| pGC1322-EX54 | | pBOT-LEU-EX54 | |
| SF1333-EX(42, 54) | GCY1333 (CPR integrant) | pBOT-TRP-EX42 | This application |
| | | pBOT-LEU-EX54 | |
| SF1333-EX(50, 54) | GCY1333 (CPR integrant) | pBOT-TRP-EX50 | This application |
| | | pBOT-LEU-EX54 | |
| SF1333-EX(56, 54) | GCY1333 (CPR integrant) | pBOT-TRP-EX56 | This application |
| | | pBOT-LEU-EX54 | |
| SF1333-EX(67, 54) | GCY1333 (CPR integrant) | pBOT-TRP-EX67 | This application |
| | | pBOT-LEU-EX54 | |
| SF1333-EX(76, 54) | GCY1333 (CPR integrant) | pBOT-TRP-EX76 | This application |
| | | pBOT-LEU-EX54 | |
| SF1333-EX(96, 54) | GCY1333 (CPR integrant) | pBOT-TRP-EX96 | This application |
| | | pBOT-LEU-EX54 | |
| SF1333- | GCY1333 (CPR integrant) | pBOT-TRP-EX101 | This application |
| EX(101, 54) | | pBOT-LEU-EX54 | |
| SF1333- | GCY1333 (CPR integrant) | pGC1322 | This application |
| pGC1322-EX98 | | pBOT-LEU-EX98 | |
| SF1333-EX(42, 98) | GCY1333 (CPR integrant) | pBOT-TRP-EX42 | This application |
| | | pBOT-LEU-EX98 | |
| SF1333-EX(50, 98) | GCY1333 (CPR integrant) | pBOT-TRP-EX50 | This application |
| | | pBOT-LEU-EX98 | |
| SF1333-EX(56, 98) | GCY1333 (CPR integrant) | pBOT-TRP-EX56 | This application |
| | | pBOT-LEU-EX98 | |
| SF1333-EX(67, 98) | GCY1333 (CPR integrant) | pBOT-TRP-EX67 | This application |
| | | pBOT-LEU-EX98 | |
| SF1333-EX(76, 98) | GCY1333 (CPR integrant) | pBOT-TRP-EX76 | This application |
| | | pBOT-LEU-EX98 | |
| SF1333-EX(96, 98) | GCY1333 (CPR integrant) | pBOT-TRP-EX96 | This application |
| | | pBOT-LEU-EX98 | |
| SF1333- | GCY1333 (CPR integrant) | pBOT-TRP-EX101 | This application |
| EX(101, 98) | | pBOT-LEU-EX98 | |
| GCY1415 | GCY1270 (CPR, TNMT integrant) | pGC552 | This application |
| GCY1416 | GCY1270 (CPR, TNMT integrant) | pGC1322 | This application |
| GCY1417 | GCY1270 (CPR, TNMT integrant) | pGC552 pGC1322 | This application |
| SF1270- | GCY1270 (CPR, TNMT integrant) | pGC1322 | This application |
| pGC1322-EX54 | | pBOT-LEU-EX54 | |
| SF1270-EX(42, 54) | GCY1270 (CPR, TNMT integrant) | pBOT-TRP-EX42 | This application |
| | | pBOT-LEU-EX54 | |
| SF1270-EX(50, 54) | GCY1270 (CPR, TNMT integrant) | pBOT-TRP-EX50 | This application |
| | | pBOT-LEU-EX54 | |
| SF1270-EX(56, 54) | GCY1270 (CPR, TNMT integrant) | pBOT-TRP-EX56 | This application |
| | | pBOT-LEU-EX54 | |
| SF1270-EX(67, 54) | GCY1270 (CPR, TNMT integrant) | pBOT-TRP-EX67 | This application |
| | | pBOT-LEU-EX54 | |
| SF1270-EX(76, 54) | GCY1270 (CPR, TNMT integrant) | pBOT-TRP-EX76 | This application |
| | | pBOT-LEU-EX54 | |
| SF1270-EX(96, 54) | GCY1270 (CPR, TNMT integrant) | pBOT-TRP-EX96 | This application |
| | | pBOT-LEU-EX54 | |
| SF1270- | GCY1270 (CPR, TNMT integrant) | pBOT-TRP-EX101 | This application |
| EX(101, 54) | | pBOT-LEU-EX54 | |
| SF1270- | GCY1270 (CPR, TNMT integrant) | pGC1322 | This application |
| pGC1322-EX98 | | pBOT-LEU-EX98 | |
| SF1270-EX(42, 98) | GCY1270 (CPR, TNMT integrant) | pBOT-TRP-EX42 | This application |
| | | pBOT-LEU-EX98 | |
| SF1270-EX(50, 98) | GCY1270 (CPR, TNMT integrant) | pBOT-TRP-EX50 | This application |
| | | pBOT-LEU-EX98 | |
| SF1270-EX(56, 98) | GCY1270 (CPR, TNMT integrant) | pBOT-TRP-EX56 | This application |
| | | pBOT-LEU-EX98 | |
| SF1270-EX(67, 98) | GCY1270 (CPR, TNMT integrant) | pBOT-TRP-EX67 | This application |
| | | pBOT-LEU-EX98 | |
| SF1270-EX(76, 98) | GCY1270 (CPR, TNMT integrant) | pBOT-TRP-EX76 | This application |
| | | pBOT-LEU-EX98 | |
| SF1270-EX(96, 98) | GCY1270 (CPR, TNMT integrant) | pBOT-TRP-EX96 | This application |
| | | pBOT-LEU-EX98 | |
| SF1270- | GCY1270 (CPR, TNMT integrant) | pBOT-TRP-EX101 | This application |
| EX(101, 98) | | pBOT-LEU-EX98 | |

| Plasmid name | Genotype ^{a, c} | Source |
|---|---|---|
| pESC-leu2d | 2μ^{ori}, pUC^{ori}, leu2d, Amp^{R}, P_{GAL1}-c-Myc tag-T_{CYC1}, P_{GAL10}-FLAG tag-T_{ADH1} | [58] |
| pGC1189 | pESC-leu2d::CPR^{b} | This Application |
| pGC1190 | pESC-leu2d::CPR^{b}-CFS | This Application |
| pGC1191 | pESC-Leu2d::CPR^{b}-SPSΔN^{b} | This Application |
| pGREG503 | CEN6/ARS4^{ori}, pMB1^{ori}, HIS3, Amp^{R}, loxP-Kan^{R}, P_{GAL1}-HISstuffer-T_{CYC1} | [55] |
| pGREG504 | CEN6/ARS4^{ori}, pMB1^{ori}, TRP1, Amp^{R}, loxP-Kan^{R}, P_{GAL1}-HISstuffer-T_{CYC1} | [55] |
| pGREG505 | CEN6/ARS4^{ori}, pMB1^{ori}, LEU2, Amp^{R}, loxP-Kan^{R}, P_{GAL1}-HISstuffer-T_{CYC1} | [55] |
| pGREG506 | CEN6/ARS4^{ori}, pMB1^{ori}, URA3, Amp^{R}, loxP-Kan^{R}, P_{GAL1}-HISstuffer-T_{CYC1} | [55] |
| pGC964 | pGREG503 ΔKpnl⁽³⁵⁵⁵⁻²⁵⁶⁰⁾A(3558)G, ΔKpnl⁽⁴⁵⁰⁹⁻⁴⁵¹⁴⁾ A(4512)G | This Application |
| pGC965 | pGREG504 ΔKpnl⁽³⁵⁵⁵⁻²⁵⁶⁰⁾A(3558)G | This Application |
| pGC966 | pGREG505 ΔKpnl⁽³⁵⁵⁵⁻²⁵⁶⁰⁾A(3558)G, ΔKpnl⁽⁵¹⁷⁶⁻⁵¹⁸¹⁾ A(5179)G | This Application |
| pGC967 | pGREG506 ΔKpnl⁽³⁵⁹³⁻³⁵⁹⁸⁾A(3596)G | This Application |
| pGC1062 | pGC966::C1-P_{TDH3}-6OMT^{b}-T_{CYC1}-C6-H1-C1-P_{FBA1}-4′OMT2^{b}-T_{ADH1}-C6-H2- | This Application |
| (Block 1) | C1- P_{PDC1}-CNMT^{b}-T_{PGI1}-C6, | |
| pGC994 | pGC965::C1-P_{TDH3}-CFS-T_{CYC1}-C6-H1-C1-P_{PDC1}-BBEΔN-T_{ADH1}-C6-H2-C1- | This Application |
| (Block 2) | P_{PMA1}-SPSΔN^{b}-TT_{PGI1}-C6 | |
| pGC997 | pGC967::C1-P_{PDC1}-P6H-T_{CYC1}-C6-H1-C1-P_{TDH3}-MSH-T_{ADH1}-C6-C1-P_{FBA1}- | This Application |
| (Block 3) | TNMT-T_{PGI1}-C6 | |
| pGC557 | pGC964::C1-P_{TDH3}-CPR^{b}-T_{CYC1}-C6 | This Application |
| pYES2 | 2μ^{ori}, pUC^{ori}, URA3, Amp^{R}, P_{GAL1}-T_{CYC1} | This Application |
| pGC655 | pYES2::P_{PMA1}-BBEΔN - T_{PGI1} | This Application |
| pGC717 | pGC964::C1- P_{FBA1}-CPR^{b}-T_{CYC1}-C6-H1-C1-P_{TDH3}-TNMT-T_{ADH1}-C6 | This Application |
| pGC550 | pGC967::C1- P_{TDH3}-SOMT-T_{CYC1}-C6-H2-C1-P_{PMA1}-CAS-T_{PGI1}-C6 | This Application |
| pBOT-TRP | CEN6/ARS4^{ori}, pMB1^{ori,} TRP1, Amp^{R}, loxP-Kan^{R}, P_{TDH3}-stuffer-T_{CYC1} | This Application |
| pBOT-LEU | CEN6/ARS4^{ori}, pMB1^{ori}, LEU2, Amp^{R}, loxP-Kan^{R}, P_{FBA1}-stuffer-T_{ADH1} | This Application |
| pBOT-TRP-EX41 | pBOT-TRP::EX41 | This Application |
| pBOT-TRP-EX42 | pBOT-TRP::EX42 | This Application |
| pBOT-TRP-EX43 | pBOT-TRP::EX43 | This Application |
| pBOT-TRP-EX44 | pBOT-TRP::EX44 | This Application |
| pBOT-TRP-EX45 | pBOT-TRP::EX45 | This Application |
| pBOT-TRP-EX46 | pBOT-TRP::EX46 | This Application |
| pBOT-TRP-EX47 | pBOT-TRP::EX47 | This Application |
| pBOT-TRP-EX48 | pBOT-TRP::EX48 | This Application |
| pBOT-TRP-EX50 | pBOT-TRP::EX49 | This Application |
| pBOT-TRP-EX51 | pBOT-TRP::EX50 | This Application |
| pBOT-TRP-EX52 | pBOT-TRP::EX51 | This Application |
| pBOT-TRP-EX53 | pBOT-TRP::EX52 | This Application |
| pBOT-TRP-EX54 | pBOT-TRP::EX53 | This Application |
| pBOT-TRP-EX55 | pBOT-TRP::EX54 | This Application |
| pBOT-TRP-EX56 | pBOT-TRP::EX55 | This Application |
| pBOT-TRP-EX57 | pBOT-TRP::EX56 | This Application |
| pBOT-TRP-EX58 | pBOT-TRP::EX57 | This Application |
| pBOT-TRP-EX59 | pBOT-TRP::EX58 | This Application |
| pBOT-TRP-EX60 | pBOT-TRP::EX59 | This Application |
| pBOT-TRP-EX61 | pBOT-TRP::EX60 | This Application |
| pBOT-TRP-EX63 | pBOT-TRP::EX61 | This Application |
| pBOT-TRP-EX64 | pBOT-TRP::EX62 | This Application |
| pBOT-TRP-EX65 | pBOT-TRP::EX63 | This Application |
| pBOT-TRP-EX66 | pBOT-TRP::EX64 | This Application |
| pBOT-TRP-EX67 | pBOT-TRP::EX65 | This Application |
| pBOT-TRP-EX68 | pBOT-TRP::EX66 | This Application |
| pBOT-TRP-EX69 | pBOT-TRP::EX67 | This Application |
| pBOT-TRP-EX70 | pBOT-TRP::EX68 | This Application |
| pBOT-TRP-EX71 | pBOT-TRP::EX69 | This Application |
| pBOT-TRP-EX72 | pBOT-TRP::EX70 | This Application |
| pBOT-TRP-EX73 | pBOT-TRP::EX71 | This Application |
| pBOT-TRP-EX74 | pBOT-TRP::EX72 | This Application |
| pBOT-TRP-EX75 | pBOT-TRP::EX73 | This Application |
| pBOT-TRP-EX76 | pBOT-TRP::EX74 | This Application |
| pBOT-TRP-EX77 | pBOT-TRP::EX75 | This Application |
| pBOT-TRP-EX79 | pBOT-TRP::EX76 | This Application |
| pBOT-TRP-EX80 | pBOT-TRP::EX77 | This Application |
| pBOT-TRP-EX81 | pBOT-TRP::EX78 | This Application |
| pBOT-TRP-EX82 | pBOT-TRP::EX79 | This Application |
| pBOT-TRP-EX83 | pBOT-TRP::EX80 | This Application |
| pBOT-TRP-EX84 | pBOT-TRP::EX81 | This Application |
| pBOT-TRP-EX85 | pBOT-TRP::EX82 | This Application |
| pBOT-TRP-EX86 | pBOT-TRP::EX83 | This Application |
| pBOT-TRP-EX87 | pBOT-TRP::EX84 | This Application |
| pBOT-TRP-EX88 | pBOT-TRP::EX85 | This Application |
| pBOT-TRP-EX89 | pBOT-TRP::EX86 | This Application |
| pBOT-TRP-EX90 | pBOT-TRP::EX87 | This Application |
| pBOT-TRP-EX91 | pBOT-TRP::EX88 | This Application |
| pBOT-TRP-EX92 | pBOT-TRP::EX89 | This Application |
| pBOT-TRP-EX93 | pBOT-TRP::EX90 | This Application |
| pBOT-TRP-EX95 | pBOT-TRP::EX91 | This Application |
| pBOT-TRP-EX96 | pBOT-TRP::EX92 | This Application |
| pBOT-TRP-EX97 | pBOT-TRP::EX93 | This Application |
| pBOT-TRP-EX98 | pBOT-TRP::EX94 | This Application |
| pBOT-TRP-EX99 | pBOT-TRP::EX95 | This Application |
| pBOT-TRP-EX100 | pBOT-TRP::EX96 | This Application |
| pBOT-TRP-EX101 | pBOT-TRP::EX97 | This Application |
| pBOT-TRP-EX102 | pBOT-TRP::EX98 | This Application |
| pBOT-TRP-EX103 | pBOT-TRP::EX99 | This Application |
| pBOT-TRP-EX104 | pBOT-TRP::EX100 | This Application |
| pBOT-TRP-EX105 | pBOT-TRP::EX101 | This Application |
| pBOT-LEU-EX54 | CEN6/ARS4^{ori}, pMB1^{ori}, LEU2, Amp^{R}, loxP-Kan^{R}, P_{TDH3}-stuffer- | This Application |
| | T_{CYC1}::EX54 | |
| pBOT-LEU-EX98 | CEN6/ARS4^{ori}, pMB1^{ori}, LEU2, Amp^{R}, loxP-Kan^{R}, P_{TDH3}-stuffer- | This Application |
| | T_{CYC1}::EX54 | |
| pGC552 | pGC967::C1- P_{TDH3}-CFS-T_{CYC1}-C6 | This Application |
| pGC1322 | pGC965::C1- P_{PMA1}- SPSΔN^{b} -T_{PGI1}-C6 | This Application |

^{a} All coding sequences are from Papaver somniferum except PH6 which is from Eschscholzia californica.
^{b}Synthetic gene. Codon-optimized sequence for expression in Saccharomyces cerevisiae.
^{c} Linkers used for cloning purposes are in bold.

### Assembly of Plasmids by Homologous Recombination

[0133] Blocks of enzymes were designed to independently express sequential enzymes of the dihydrosanguinarine pathway. Enzyme blocks were cloned into the pGREG series of E. coli-S. cerevisiae shuttle vectors⁵⁵. Vectors pGREG503, 504, 505 and 506, harbouring the HIS3, TRP1, LEU2 and URA3 auxotrophic markers, respectively, were modified by site-directed mutagenesis to contain a unique KpnI site at the 3′ end of a stuffer cassette in the multiple cloning site using the PCR primers reported in Supplemental Table 3. Gene expression cassettes were inserted by homologous recombination into pGREG vectors previously linearized with AscI/KpnI. Empty pGREG control plasmids were created by intra-molecular ligation of the linearized pGREG made blunt with T4 DNA polymerase.

TABLE 3
Oligonucleotides used in site-directed
mutagenesis of the pGREG vector series in
order to eliminate additional KpnI sites

| Primer name | Sequence 5′→3′ |
|---|---|
| Kpn_forward | TAATTAAGGGTGCCCAATTCGCCCTA |
| | TAGTGAGT (SEQ ID NO: 385) |
| Kpn_reverse | TAGGGCGAATTGGGCACCCTTAATTA |
| | AGACAAC (SEQ ID NO: 386) |
| KpnURA_f | CGTTGGTGCCATTGGGCGAGGTGGCT |
| | TCTCT (SEQ ID NO: 387) |
| KpnURA_r | CCTCGCCCAATGGCACCAACGATGTT |
| | C (SEQ ID NO: 388) |
| KpnLEU_f | CTAAATGGGGTGCCGGTATTAGACCT |
| | GAACAAG (SEQ ID NO: 389) |
| KpnLEU_r | CGTCTAACACTACCGGCACCCCATTT |
| | AGGACCAC (SEQ ID NO: 390) |

[0134] The DNA assembler technique, which takes advantage of in vivo homologous recombination in yeast⁹, was used for the assembly of the sanguinarine pathway. Promoters, genes, and terminators were assembled by incorporating a ˜50-bp homologous region between the segments. Expression cassettes were joined to each other and to the vector backbone using DNA linkers (C6-H(n)-C1 linkers in Table 4), with the exception of some components of Block 3. DNA linkers were added to promoters and terminators by PCR using the primers listed in Table 4 and CEN.PK genomic DNA as template. In addition, a NotI site was introduced in the 3′ linker primer containing homology to pGREG backbones, allowing the excision of enzyme blocks by AscI/NotI double digest. PsBBEΔN was also independently cloned into the 2μ, high copy vector pYES2. For DNA assembly, the pYES2 backbone was amplified by PCR using primers pYES2 for and pYES2 rev described in Table 4. Transformation of DNA fragments in yeast for homologous recombination was accomplished by electroporation. Assembled plasmids were transferred to E. coli and sequenced-verified. All the plasmids used in examples presented herein are described in Table 1 and Table 2.

TABLE 4
Oligonucleotides used for amplifications
of expression construct parts

| | |
|---|---|
| Name | Sequence 5′→3′ |

pESC-CPR/CFS

| | |
|---|---|
| PsCFS for | GCGGCCGCAAAAATGGAGGTGACATTTTGGTTG |
| | (SEQ ID NO: 391) |
| PsCFS rev | ACTAGTGCATGGATACGAGGAGTAAT |
| | (SEQ ID NO: 392) |

pGC1062

| | |
|---|---|
| pG:C1 for | TAACCCTCACTAAAGGGAACAAAAGCTGGAGCT |
| | CGTTTAAACGGCGCGCCGAGACTGCAGCATTAC |
| | TTTGAGAAG (SEQ ID NO: 393) |
| TDH3p rev | TTGATACTGTTTCCATTGTTTTTCGAAACTAAG |
| | TTCTTGGTGTTTTAAAAC |
| | (SEQ ID NO: 394) |
| 60MT for | AAACACCAAGAACTTAGTTTCGAAAAACAATGG |
| | AAACAGTATCAAAGATCG |
| | (SEQ ID NO: 395) |
| 60MT rev | TAAGCGTGACATAACTAATTACATGATCAATAT |
| | GGATAGGCTTCGATCAC |
| | (SEQ ID NO: 396) |
| CYCt for | GTGATCGAAGCCTATCCATATTGATCATGTAAT |
| | TAGTTATGTCACGCTTAC |
| | (SEQ ID NO: 397) |
| FBA1p rev | CCAAGGAACCCATTGTTTTTATGTATTACTTGG |
| | TTATGGTTATATATGAC |
| | (SEQ ID NO: 398) |
| 4CMT_2 for | ATATAACCATAACCAAGTAATACATAAAAACAA |
| | TGGGTTCCTTGGATGCG |
| | (SEQ ID NO: 399) |
| 4CMT_2 rev | CAAACCTCTGGCGAAGAAGTCCATTATGGAAAA |
| | GCTTCTATAACAGATTGTATTGC |
| | (SEQ ID NO: 400) |
| ADH1t for | CAATCTGTTATAGAAGCTTTTCCATAATGGACT |
| | TCTTCGCCAGAGGTTTG |
| | (SEQ ID NO: 401) |
| PDC1p rev | TTTGCTTTCAGTTGCATTGTTTTTGATTTGACT |
| | GTGTTATTTTGCGTGAG |
| | (SEQ ID NO: 402) |
| CNMT rev | GCAAAATAACACAGTCAAATCAAAAACAATGCA |
| | ACTGAAAGCAAAGGAAG |
| | (SEQ ID NO: 403) |
| CNMT for | GCAAAATAACACAGTCAAATCAAAAACAATGCA |
| | ACTGAAAGCAAAGGAAG |
| | (SEQ ID NO: 404) |
| PGlt for | TCTTTAAGAAAAAGTAAAACAAATCGCTCTTAA |
| | ATATATACCTAAAGAAC |
| | (SEQ ID NO: 405) |
| pG:C6 rev | ATAACTTCGTATAATGTATGCTATACGAAGTTA |
| | TTAGGTACCGCGGCCGCACAACTCATGGTGATG |
| | TGATTGCC (SEQ ID NO: 406) |

pGC994

| | |
|---|---|
| pG:C1 for | TAACCCTCACTAAAGGGAACAAAAGCTGGAGCT |
| | CGTTTAAACGGCGCGCCGAGACTGCAGCATTAC |
| | TTTGAGAAG (SEQ ID NO: 407) |
| TDH3p rev | CAACCAAAATGTCACCTCCATTGTTTTTCGAAA |
| | CTAAGTTCTTGGTGTTTTAAAAC |
| | (SEQ ID NO: 408) |
| CheSyn for | TTTTAAAACACCAAGAACTTAGTTTCGAAAAAC |
| | AATGGAGGTGACATTTTGGTTGATAAC |
| | (SEQ ID NO: 409) |
| CheSyn rev | GTAAGCGTGACATAACTAATTACATGATTAATG |
| | GATACGAGGAGTAATTTTGGC |
| | (SEQ ID NO: 410) |
| CYC1t for | GCCAAAATTACTCCTCGTATCCATTAATCATGT |
| | AATTAGTTATGTCACGCTTAC |
| | (SEQ ID NO: 411) |
| C6:pG rev | CAATCTCGCCCACAGCCCCTTTCTTTAATCATT |
| | CCGACCCCCGCCATGAGACAACTCATGGTGATG |
| | TGATTGCC (SEQ ID NO: 412) |
| C1:H1 for | CTCATGGCGGGGGTCGGAATGATTAAAGAAAGG |
| | GGCTGTGGGCGAGATTGGAGACTGCAGCATTAC |
| | TTTGAGAAG (SEQ ID NO: 413) |
| PDC1p rev | GGAGATTATCATTAACATCACCCATTGTTTTTG |
| | ATTTGACTGTGTTATTTTGCGTGAGG |
| | (SEQ ID NO: 414) |
| BBE for | AATAACACAGTCAAATCAAAAACAATGGGTGAT |
| | GTTAATGATAATCTCCTCTCGTCATG |
| | (SEQ ID NO: 415) |
| BBE rev | AAACCTCTGGCGAAGAAGTCCACAATTCCTTCA |
| | ACATGTAAATTTCCTCAAATTTC |
| | (SEQ ID NO: 416) |
| ADH1t for | GAAATTTGAGGAAATTTACATGTTGAAGGAATT |
| | GTGGACTTCTTCGCCAGAGGTTT |
| | (SEQ ID NO: 417) |
| C6:H2 rev | TGGTGACCTCCATTAGGCCACCATCATGTTTGC |
| | CACGGTTTATTAACTGGACAACTCATGGTGATG |
| | TGATTGCC (SEQ ID NO: 418) |
| C1:H2 for | CCAGTTAATAAACCGTGGCAAACATGATGGTGG |
| | CCTAATGGAGGTCACCAGAGACTGCAGCATTAC |
| | TTTGAGAAG (SEQ ID NO: 419) |
| PMA1p rev | AGGTAGTAATCGATAATTCCATTTTGATAATTA |
| | AATCTTTCTTATCTTCTTATTCTTTTC |
| | (SEQ ID NO: 420) |
| StySyn for | TAAGAAGATAAGAAAGATTTAATTATCAAAATG |
| | GAATTATCGATTACTACCTCAATAGC |
| | (SEQ ID NO: 421) |
| StySyn rev | GTTCTTTAGGTATATATTTAAGAGCGATTTGTT |
| | TTAAACTCTTGGGACTATCCTCGC |
| | (SEQ ID NO: 422) |
| PGl1t for | GCGAGGATAGTCCCAAGAGTTTAAAACAAATCG |
| | CTCTTAAATATATACCTAAAGAAC |
| | (SEQ ID NO: 423) |
| pG:C6 rev | ATAACTTCGTATAATGTATGCTATACGAAGTTA |
| | TTAGGTACCGCGGCCGCACAACTCATGGTGATG |
| | TGATTGCC (SEQ ID NO: 424) |

pGC997

| | |
|---|---|
| pG:C1 for | TAACCCTCACTAAAGGGAACAAAAGCTGGAGCT |
| | CGTTTAAACGGCGCGCCGAGACTGCAGCATTAC |
| | TTTGAGAAG (SEQ ID NO: 425) |
| PDC1p rev | AGCAAGCATTAAGGAATCCATTGTTTTTGATTT |
| | GACTGTGTTATTTTG (SEQ ID NO: 426) |
| P6H for | GCAAAATAACACAGTCAAATCAAAAACAATGGA |
| | TTCCTTAATGCTTG (SEQ ID NO: 427) |
| P6H rev | TGTAAGCGTGACATAACTAATTACATGACTATT |
| | CGTACAACTTGTAATGT |
| | (SEQ ID NO: 428) |
| CYC1t for | TCGTCTACATTACAAGTTGTACGAATAGTCATG |
| | TAATTAGTTATGTCACG |
| | (SEQ ID NO: 429) |
| C6:H1 rev | CAATCTCGCCCACAGCCCCTTTCTTTAATCATT |
| | CCGACCCCCGCCATGAGACAACTCATGGTGATG |
| | TGATTGCC (SEQ ID NO: 430) |
| C1:H1 for | CTCATGGCGGGGGTCGGAATGATTAAAGAAAGG |
| | GGCTGTGGGCGAGATTGGAGACTGCAGCATTAC |
| | TTTGAGAAG (SEQ ID NO: 431) |
| TDH3p rev | CGGTCTGTTTGTTTTGATTGATTCGGTTCGCAT |
| | TGTTTTTCGAAACTAAGTTCTTGGTG |
| | (SEQ ID NO: 432) |
| MSH for | TTTAAAACACCAAGAACTTAGTTTCGAAAAACA |
| | ATGCGAACCGAATCAAT |
| | (SEQ ID NO: 433) |
| MSH rev | CCTCTGGCGAAGAAGTCCATCATATCTCGAGTC |
| | GAGGTTTGATC (SEQ ID NO: 434) |
| ADH1t for | GATCAAACCTCGACTCGAGATATGATGGACTTC |
| | TTCGCCAGAGG (SEQ ID NO: 435) |
| ADH1t rev | ACAACTCATGGTGATGTGATTGCCGCATGCCGG |
| | TAGAGGTGTGGT (SEQ ID NO: 436) |
| FBA1p for | ACCACACCTCTACCGGCATGCGGCAATCACATC |
| | ACCATGAGTTGT (SEQ ID NO: 437) |
| FBA1p rev | TCATCTATTGAACCCATTGTTTTTATGTATTAC |
| | TTGGTTATGGTTATATATGACAAAAG |
| | (SEQ ID NO: 438) |
| TNMT for | TATATAACCATAACCAAGTAATACATAAAAACA |
| | ATGGGTTCAATAGATGAGGTCAAGAA |
| | (SEQ ID NO: 439) |
| TNMT rev | GTTCTTTAGGTATATATTTAAGAGCGATTTGTT |
| | CTACTTCTTCTTGAAAAGCAGCTG |
| | (SEQ ID NO: 440) |
| PGl1t for | GCAGCTGCTTTTCAAGAAGAAGTAGAACAAATC |
| | GCTCTTAAATATATACCTAAAG |
| | (SEQ ID NO: 441) |
| pG:C6 rev | ATAACTTCGTATAATGTATGCTATACGAAGTTA |
| | TTAGGTACCGCGGCCGCACAACTCATGGTGATG |
| | TGATTGCC (SEQ ID NO: 442) |

pGC577

| | |
|---|---|
| pG:C6 rev | TAACCCTCACTAAAGGGAACAAAAGCTGGAGCT |
| | CGTTTAAACGGCGCGCCGAGACTGCAGCATTAC |
| | TTTGAGAAG (SEQ ID NO: 443) |
| TDH3p rev | GTTTGCCAGGTTGTTTGACCCCATTGTTTTTCG |
| | AAACTAAGTTCTTGGTGTTTTAAAAC |
| | (SEQ ID NO: 444) |
| CPR for | GTTTTAAAACACCAAGAACTTAGTTTCGAAAAA |
| | CAATGGGGTCAAACAACCTGGC |
| | (SEQ ID NO: 445) |
| CPR rev | GTAAGCGTGACATAACTAATTACATGATTACCA |
| | TACATCTCTCAAGTATCTCTC |
| | (SEQ ID NO: 446) |
| CYC1t for | GAGAGATACTTGAGAGATGTATGGTAATCATGT |
| | AATTAGTTATGTCACGCTTAC |
| | (SEQ ID NO: 447) |
| pG:C6 rev | CAATCTCGCCCACAGCCCCTTTCTTTAATCATT |
| | CCGACCCCCGCCATGAGACAACTCATGGTGATG |
| | TGATTGCC (SEQ ID NO: 448) |

pGC655

| | |
|---|---|
| pYES2 for | GGCCCTGCATTAATGAATCG |
| | (SEQ ID NO: 449) |
| pYES2 rev | ACTAGTGGATCATCCCCAC |
| | (SEQ ID NO: 450) |
| pY:C1 for | CCGCCGCGCTTAATGGGGCGCTACAGGGCGCGT |
| | GGGGATGATCCACTAGTGAGACTGCAGCATTAC |
| | TTTGAGAAG (SEQ ID NO: 451) |
| PMA1p rev | CATTAACATCACCCATTGTTTTTTTGATAATTA |
| | AATCTTTCTTATCTTCTTATTCTTTTC |
| | (SEQ ID NO: 452) |
| BBE for | GAAGATAAGAAAGATTTAATTATCAAAAAAACA |
| | ATGGGTGATGTTAATGATAATCTCCTC |
| | (SEQ ID NO: 453) |
| BBE rev | CTTTAGGTATATATTTAAGAGCGATTTGTTCTA |
| | CAATTCCTTCAACATGTAAATTTCC |
| | (SEQ ID NO: 454) |
| PGl1t for | GGAAATTTACATGTTGAAGGAATTGTAGAACAA |
| | ATCGCTCTTAAATATATACCTAAAG |
| | (SEQ ID NO: 455) |
| pY:C6 | CAATACGCAAACCGCCTCTCCCCGCGCGTTGGC |
| | CGATTCATTAATGCAGGACAACTCATGGTGATG |
| | TGATTGCC (SEQ ID NO: 456) |

pGC717

| | |
|---|---|
| pG:C1 for | TAACCCTCACTAAAGGGAACAAAAGCTGGAGCT |
| | CGTTTAAACGGCGCGCCGAGACTGCAGCATTAC |
| | TTTGAGAAG (SEQ ID NO: 457) |
| FBA1p rev | GCCAGGTTGTTTGACCCCATTGTTTTTATGTAT |
| | TACTTGGTTATGGTTATATATGAC |
| | (SEQ ID NO: 458) |
| CPR for | GTCATATATAACCATAACCAAGTAATACATAAA |
| | AACAATGGGGTCAAACAACCTGGC |
| | (SEQ ID NO: 459) |
| CPR rev | GTAAGCGTGACATAACTAATTACATGATTACCA |
| | TACATCTCTCAAGTATCTCTC |
| | (SEQ ID NO: 460) |
| CYC1t for | GAGAGATACTTGAGAGATGTATGGTAATCATGT |
| | AATTAGTTATGTCACGCTTAC |
| | (SEQ ID NO: 461) |
| C6:H1 rev | CAATCTCGCCCACAGCCCCTTTCTTTAATCATT |
| | CCGACCCCCGCCATGAGACAACTCATGGTGATG |
| | TGATTGCC (SEQ ID NO: 462) |
| C1:H1 for | CTCATGGCGGGGGTCGGAATGATTAAAGAAAGG |
| | GGCTGTGGGCGAGATTGGAGACTGCAGCATTAC |
| | TTTGAGAAG (SEQ ID NO: 463) |
| TDH3p rev | CTTGACCTCATCTATTGAACCCATTGTTTTTCG |
| | AAACTAAGTTCTTGGTGTTTTAAAAC |
| | (SEQ ID NO: 464) |
| TNMT for | GTTTTAAAACACCAAGAACTTAGTTTCGAAAAA |
| | CAATGGGTTCAATAGATGAGGTCAAG |
| | (SEQ ID NO: 465) |
| TNMT rev | GACTTGACCAAACCTCTGGCGAAGAAGTCCACT |
| | ACTTCTTCTTGAAAAGCAGCTG |
| | (SEQ ID NO: 466) |
| ADH1t for | GGATGGTTGCGCAGCTGCTTTTCAAGAAGAAGT |
| | AGTGGACTTCTTCGCCAGAGGT |
| | (SEQ ID NO: 467) |
| pG:C6 rev | ATAACTTCGTATAATGTATGCTATACGAAGTTA |
| | TTAGGTACCGCGGCCGCACAACTCATGGTGATG |
| | TGATTGCC (SEQ ID NO: 468) |

pGC550

| | |
|---|---|
| pG:C1 for | TAACCCTCACTAAAGGGAACAAAAGCTGGAGCT |
| | CGTTTAAACGGCGCGCCGAGACTGCAGCATTAC |
| | TTTGAGAAG (SEQ ID NO: 488) |
| TDH3p rev | GAAAATTTCGCCATTGGTAGCCATTGTTTTTCG |
| | AAACTAAGTTCTTGGTGTTTTAAAAC |
| | (SEQ ID NO: 489) |
| TDH3p for | GTTTTAAAACACCAAGAACTTAGTTTCGAAAAA |
| | CAATGGCTACCAATGGCGAAATTTTC |
| | (SEQ ID NO: 490) |
| SOMT rev | GTAAGCGTGACATAACTAATTACATGATCATTT |
| | GTGAAACTCAATGACATGAAG |
| | (SEQ ID NO: 491) |
| SOMT for | CTTCATGTCATTGAGTTTCACAAATGATCATGT |
| | AATTAGTTATGTCACGCTTAC |
| | (SEQ ID NO: 492) |
| C6:H1 rev | CAATCTCGCCCACAGCCCCTTTCTTTAATCATT |
| | CCGACCCCCGCCATGAGACAACTCATGGTGATG |
| | TGATTGCC (SEQ ID NO: 493) |
| C1:H1 for | CTCATGGCGGGGGTCGGAATGATTAAAGAAAGG |
| | GGCTGTGGGCGAGATTGGAGACTGCAGCATTAC |
| | TTTGAGAAG (SEQ ID NO: 494) |
| PMA1 rev | GTTACTCATGATCATTGTTTTTTTGATAATTAA |
| | ATCTTTCTTATCTTCTTATTCTTTTC |
| | (SEQ ID NO: 495) |
| PMA1p for | GATAAGAAAGATTTAATTATCAAAAAAACAATG |
| | ATCATGAGTAACTTATGGATTCTTAC |
| | (SEQ ID NO: 496) |
| CanSyn rev | GTTCTTTAGGTATATATTTAAGAGCGATTTGTT |
| | CTACAAACGAGGAACTATACGTGC |
| | (SEQ ID NO: 497) |
| CanSyn for | CGAAGCACGTATAGTTCCTCGTTTGTAGAACAA |
| | ATCGCTCTTAAATATATACCTAAAG |
| | (SEQ ID NO: 498) |
| pG:C6 rev | ATAACTTCGTATAATGTATGCTATACGAAGTTA |
| | TTAGGTACCGCGGCCGCACAACTCATGGTGATG |
| | TGATTGCC (SEQ ID NO: 499) |

pGC552

| | |
|---|---|
| pG:C1 for | TAACCCTCACTAAAGGGAACAAAAGCTGGAGCT |
| | CGTTTAAACGGCGCGCCGAGACTGCAGCATTAC |
| | TTTGAGAAG (SEQ ID NO: 500) |
| TDH3p rev | CAACCAAAATGTCACCTCCATTGTTTTTCGAAA |
| | CTAAGTTCTTGGTGTTTTAAAAC |
| | (SEQ ID NO: 501) |
| TDH3p for | TTTTAAAACACCAAGAACTTAGTTTCGAAAAAC |
| | AATGGAGGTGACATTTTGGTTGATAAC |
| | (SEQ ID NO: 502) |
| CheSyn rev | GTAAGCGTGACATAACTAATTACATGATTAATG |
| | GATACGAGGAGTAATTTTGGC |
| | (SEQ ID NO: 503) |
| CheSyn for | GCCAAAATTACTCCTCGTATCCATTAATCATGT |
| | AATTAGTTATGTCACGCTTAC |
| | (SEQ ID NO: 504) |
| pG:C6 rev | ATAACTTCGTATAATGTATGCTATACGAAGTTA |
| | TTAGGTACCGCGGCCGCACAACTCATGGTGATG |
| | TGATTGCC (SEQ ID NO: 505) |

pGC1322

| | |
|---|---|
| pG:C1 for | TAACCCTCACTAAAGGGAACAAAAGCTGGAGCT |
| | CGTTTAAACGGCGCGCCGAGACTGCAGCATTAC |
| | TTTGAGAAG (SEQ ID NO: 506) |
| PMA1p rev | CGTCAAAATCTTGTCCGAAAATCAATC |
| | (SEQ ID NO: 507) |
| PMA1p for | GAAGATAAGAAAGATTTAATTATCAAAAAAACA |
| | ATGGAATTATCGATTACTACCTC |
| | (SEQ ID NO: 508) |
| SPSΔN rev | GCGATTTGTTCTAAGCGTAATCTGGAACATCGT |
| | ATGGGTAAACTCTTGGGACTATCCTC |
| | (SEQ ID NO: 509) |
| SPSΔN for | TACCCATACGATGTTCCAGATTACGCTTAGAAC |
| | AAATCGCTCTTAAATATATAC |
| | (SEQ ID NO: 510) |
| pG:C6 rev | ATAACTTCGTATAATGTATGCTATACGAAGTTA |
| | TTAGGTACCGCGGCCGCACAACTCATGGTGATG |
| | TGATTGCC (SEQ ID NO: 511) |

Integration of Enzyme Blocks into the Genome

[0135] Integration of enzyme blocks into the genome of S. cerevisiae was achieved through targeted homologous recombination to integration sites shown to support relatively high levels of gene expression³⁵. Enzyme blocks were integrated into the genome using upstream and downstream homology regions, selection cassettes, and gene cassettes, as parts for chromosomal DNA assembly⁹. Selection cassettes Hyg^{R} and G418^{R} (for Blocks 2 and 3, respectively), were amplified from pZC3 and pUG6, while genomic homology regions (site 18 on chromosome XV and site 20 on chromosome XVI for Blocks 2 and 3, respectively) were amplified from CEN.PK genomic DNA using primers described in Table 5. Gene cassettes of Blocks 2 and 3 were excised from their plasmids by AscI//NotI-HF/XbaI digestion. Parts for assembly were transformed into S. cerevisiae by the lithium acetate method and integrants were selected on solid media. Successful integration was verified by PCR using genomic DNA as template.

TABLE 5A
Oligonucleotides used for genomic DNA
amplifications for cassette integration

| | |
|---|---|
| Primer name | Sequence 5′→3′ |

Integration site 18

| | |
|---|---|
| 18 Up for | TGTGCACAAAGGCCATAATATTATGTC |
| | (SEQ ID NO: 469) |
| 18 Up rev | TAATTTCGATAAGCCAGGTTAACCTGC |
| | GGCATGAGTTATGGTTGCACAGT |
| | (SEQ ID NO: 470) |
| HygR for | GGTAACTGTGCAACCATAACTCATGCC |
| | GCAGGTTAACCTGGCTTATCGAA |
| | (SEQ ID NO: 471 |
| HygR rev | CTCAAAGTAATGCTGCAGTCTCGGCGC |
| | GCCGGCTACAATTAATACATAACCTTA |
| | TGTATC |
| | (SEQ ID NO: 472) |
| 18 Down for | CTCAAAGTAATGCTGCAGTCTCGGCGC |
| | GCCGGCTACAATTAATACATAACCTTA |
| | TGTATC |
| | (SEQ ID NO: 473) |
| 18 Down rev | AAAGCTGGCTCCCCTTAGACAA |
| | (SEQ ID NO: 474) |

Integration site 20

| | |
|---|---|
| 20 Up for | GCCAGGCGCCTTTATATCAT |
| | (SEQ ID NO: 475) |
| 20 Up rev | TAATTTCGATAAGCCAGGTTAACCTGC |
| | TTTGCGAAACCCTATGCTCT |
| | (SEQ ID NO: 476) |
| G418 for | TTCAAATCCGAACAACAGAGCATAGGG |
| | TTTCGCAAAGCAGGTTAACCTGGCTTA |
| | TCGAA |
| | (SEQ ID NO: 477) |
| G418 rev | CTCAAAGTAATGCTGCAGTCTCGGCGC |
| | GCCGGCTACAATTAATACATAACCTTA |
| | TGTATC |
| | (SEQ ID NO: 478) |
| 20 Down for | GGCAATCACATCACCATGAGTTGTGCG |
| | GCCGCAATGGAAGGTCGGGATGAG |
| | (SEQ ID NO: 479) |
| 20 Down rev | ATAAAGCAGCCGCTACCAAA |
| | (SEQ ID NO: 480) |

Integration site 16

| | |
|---|---|
| 16 Up for | TTCGTGAAACACGTGGGATACC |
| | (SEQ ID NO: 512) |
| 16 Up rev | TCGTATTAATTTCGATAAGCCA |
| | GGTTAACCTGCTCCGTTAATTC |
| | GGGTTTCAATCACTT |
| | (SEQ ID NO: 513) |
| G418 for | TTCAAATCCGAACAACAGAGCA |
| | TAGGGTTTCGCAAAGCAGGTTA |
| | ACCTGGCTTATCGAA |
| | (SEQ ID NO: 514) |
| G418 rev | CTCAAAGTAATGCTGCAGTCTC |
| | GGCGCGCCGGCTACAATTAATA |
| | CATAACCTTATGTATC |
| | (SEQ ID NO: 515) |
| 16 Down for | GGCAATCACATCACCATGAGTT |
| | GTGCGGCCGCTGCCTACGCAAC |
| | ACTTTAGCTG |
| | (SEQ ID NO: 516) |
| 16 Down rev | TTGTTGGGATTCCATTGTGATT |
| | AAGG |
| | (SEQ ID NO: 517) |

TABLE 6
Primers used to generate the pBOT vectors

| | |
|---|---|
| Primer name | Sequence 5′→3′ |

Generation of four promoter-SapI-
stuffer-KasI-GFP-KasI-terminator cassettes

| | |
|---|---|
| GFP_Sap_TAA_CYCt_F | CACATGGCATGGATGAGCTC |
| | TACAAATAAGCTCTTCTTAA |
| | TCATGTAATTAGTTATGTCA |
| | CG |
| | (SEQ ID NO: 518) |
| GFP_Sap_TAA_Adh1t_f | CACATGGCATGGATGAGCTC |
| | TACAAATAAGCTCTTCTTAA |
| | TGGACTTCTTCGCCA |
| | (SEQ ID NO: 519) |
| GFP_Sap_TAA_PGlt_f | CACATGGCATGGATGAGCTC |
| | TACAAATAAGCTCTTCTTAA |
| | AACAAATCGCTCTTAAATAT |
| | ATAC |
| | (SEQ ID NO: 520) |
| GFP_Sap_TAA_Tpit_f | CACATGGCATGGATGAGCTC |
| | TACAAATAAGCTCTTCTTAA |
| | ACATAGTGTTTAAAGATTAC |
| | GG |
| | (SEQ ID NO: 521) |
| GFP_Koz_sap_ACA_Tdh3p_R | GAAAAGTTCTTCTCCTTTAC |
| | TCATTGTTTGCTCTTCTGTT |
| | TCGAAACTAAGTTCTTGGT |
| | (SEQ ID NO: 522) |
| GFP_Koz_sap_ACA_Tef1p_R | GAAAAGTTCTTCTCCTTTAC |
| | TCATTGTTTGCTCTTCTGTT |
| | ATTAAAACTTAGATTAGATT |
| | GCTATG |
| | (SEQ ID NO: 523) |
| GFP_Koz_sap_ACA_Pdc1p_R | GAAAAGTTCTTCTCCTTTAC |
| | TCATTGTTTGCTCTTCTGTT |
| | TGATTTGACTGTGTTATTTT |
| | G |
| | (SEQ ID NO: 524) |
| pfoldgfp_CYCt_F | TGCTGGGATTACACATGGCA |
| | TGGATGAACTATACAAATAA |
| | TCATGTAATTAGTTATGTCA |
| | CG |
| | (SEQ ID NO: 525) |
| pfoldgfp_Adh1t_f | TGCTGGGATTACACATGGCA |
| | TGGATGAACTATACAAATAA |
| | TGGACTTCTTCGCCA |
| | (SEQ ID NO: 526) |
| pfoldgfp_PGlt_f | TGCTGGGATTACACATGGCA |
| | TGGATGAACTATACAAATAA |
| | AACAAATCGCTCTTAAATAT |
| | ATAC |
| | (SEQ ID NO: 527) |
| pfoldgfp_Tpit_f | TGCTGGGATTACACATGGCA |
| | TGGATGAACTATACAAATAA |
| | ACATAGTGTTTAAAGATTAC |
| | GG |
| | (SEQ ID NO: 528) |
| pfoldgfp_pure_R | TTATTTGTATAGTTCATCCA |
| | TGC |
| | (SEQ ID NO: 529) |
| GFP_pfoldgfp_F | TGCTGGGATTACACATGGCA |
| | TGGATGAACTATACAAATAA |
| | GGATCCGCTGGCT |
| | (SEQ ID NO: 530) |
| L1_Koz_sap_AAACA_Tdh3p_R | TTAATTATTTCTCTTCCTTT |
| | TATAATAAATTTTCTAGGCT |
| | CTTCATGTTTTCGAAACTAA |
| | GTTCTTGGT |
| | (SEQ ID NO: 531) |
| L1_Koz_sap_AAACA_Tef1p_R | TTAATTATTTCTCTTCCTTT |
| | TATAATAAATTTTCTAGGCT |
| | CTTCATGTTTATTAAAACTT |
| | AGATTAGATTGCTATG |
| | (SEQ ID NO: 532) |
| L1_Koz_sap_AAACA_Fba1p_R | TTAATTATTTCTCTTCCTTT |
| | TATAATAAATTTTCTAGGCT |
| | CTTCATGTTTTATGTATTAC |
| | TTGGTTATGGTTATATAT |
| | (SEQ ID NO: 533) |
| L1_Koz_sap_AAACA_Pma1p_R | TTAATTATTTCTCTTCCTTT |
| | TATAATAAATTTTCTAGGCT |
| | CTTCATGTTTTTTGATAATT |
| | AAATCTTTCTTATCTT |
| | (SEQ ID NO: 534) |
| L1_sap_Kas_GFP_F | AGCCTAGAAAATTTATTATA |
| | AAAGGAAGAGAAATAATTAA |
| | ACAGCTCTTCTGGCGCCGCT |
| | GGCTCCGCTG |
| | (SEQ ID NO: 535) |
| Stop2_Kas_GFP_R | TTAGGCGCCTTATTTGTATA |
| | GTTCATCCATG |
| | (SEQ ID NO: 536) |
| pfoldgfp_KasI_TAA_CYCt_F | CACATGGCATGGATGAACTA |
| | TACAAATAAGGCGCCTAATC |
| | ATGTAATTAGTTATGTCACG |
| | (SEQ ID NO: 537) |
| pfoldgfp_KasI_TAA_Adh1t_f | CACATGGCATGGATGAACTA |
| | TACAAATAAGGCGCCTAATG |
| | GACTTCTTCGCCA |
| | (SEQ ID NO: 538) |
| pfoldgfp_KasI_TAA_PGlt_f | CACATGGCATGGATGAACTA |
| | TACAAATAAGGCGCCTAAAA |
| | CAAATCGCTCTTAAATATAT |
| | AC |
| | (SEQ ID NO: 539) |
| pfoldgfp_KasI_TAA_Tpit_f | CACATGGCATGGATGAACTA |
| | TACAAATAAGGCGCCTAAGA |
| | TTAATATAATTATATAAAAA |
| | TATTATCTTCTTT |
| | (SEQ ID NO: 540) |

Generation of modular backbones

| | |
|---|---|
| LX_(Kan)_R | TGACCTAGACTGGCTTTGAT |
| | CTTTAATTACACACTTATCC |
| | CAGCTGAAGCTTCGTACGCT |
| | GCAGG |
| | (SEQ ID NO: 541) |
| LX_NdeI_(HISt)_f | GGATAAGTGTGTAATTAAAG |
| | ATCAAAGCCAGTCTAGGTCA |
| | TATGCGTCGAGTTCAAGAGA |
| | AA |
| | (SEQ ID NO: 542) |
| LX_NdeI_(LEUt)_f | GGATAAGTGTGTAATTAAAG |
| | ATCAAAGCCAGTCTAGGTCA |
| | TATGTCGACTACGTCGTAAG |
| | G |
| | (SEQ ID NO: 543) |
| LX_NdeI_(URAt)_f | GGATAAGTGTGTAATTAAAG |
| | ATCAAAGCCAGTCTAGGTCA |
| | TATGGGTAATAACTGATATA |
| | ATTAAATTGAAG |
| | (SEQ ID NO: 544) |
| Lx_KamMX_R | TGACCTAGACTGGCTTTGAT |
| | CTTTAATTACACACTTATCC |
| | TCGACAACCCTTAATATAAC |
| | TT |
| | (SEQ ID NO: 545) |
| LY_(HISp)_r | CTGTTGCCTGACGTGAGTGG |
| | TGCCTTTGATGATGAGATAC |
| | CGTTTTAAGAGCTTGGTG |
| | (SEQ ID NO: 546) |
| LY_(LEUp)_r | CTGTTGCCTGACGTGAGTGG |
| | TGCCTTTGATGATGAGATAC |
| | CGAGGAGAACTTCTAGTATA |
| | TCC |
| | (SEQ ID NO: 547) |
| LY_(CEN6ARS4)_F | GTATCTCATCATCAAAGGCA |
| | CCACTCACGTCAGGCAACAG |
| | GGACGGATCGCTTG |
| | (SEQ ID NO: 548) |
| LY_(2micron)_F | GTATCTCATCATCAAAGGCA |
| | CCACTCACGTCAGGCAACAG |
| | ATACTCCGTCTACTGTACGA |
| | TAC |
| | (SEQ ID NO: 549) |
| LY_(URAp)_r | CTGTTGCCTGACGTGAGTGG |
| | TGCCTTTGATGATGAGATAC |
| | ATTCATCATTTTTTTTTTAT |
| | TCTT |
| | (SEQ ID NO: 550) |
| LZ_(CEN6ARS4)_R | CTGACGTCGGTAAAGTAGGA |
| | GTGTCTGCAATAGGTCTTAA |
| | GGTCCTTTTCATCACGT |
| | (SEQ ID NO: 551) |
| LZ_(2micron)_R | CTGACGTCGGTAAAGTAGGA |
| | GTGTCTGCAATAGGTCTTAA |
| | GTGCTATATCCCTATATAAC |
| | CTACC |
| | (SEQ ID NO: 552) |
| LZ_(Ecoli_unit)_F_ | TTAAGACCTATTGCAGACAC |
| pBluescript | TCCTACTTTACCGACGTCAG |
| | CAGGTGGCACTTTTCG |
| | (SEQ ID NO: 553) |
| LV3_AscI_(pMB1ori)_R_ | GCATTTTTATTATATAAGTT |
| pBluescript | GTTTTATTCAGAGTATTCCT |
| | GGCGCGCCCGCGTTGCTGGC |
| | GTT |
| | (SEQ ID NO: 554) |
| LV5_NotI_kanmx_F | CCTCTTTATATTACATCAAA |
| | ATAAGAAAATAATTATAACA |
| | CAGATCCGCGGCCGC |
| | (SEQ ID NO: 555) |

### Cell Feeding Assays

[0136] Whole cell substrate feeding assays were used to test the function of each enzyme block individually and in combinations. To prepare the cells for the feeding assays, a colony of S. cerevisiae was inoculated in YNB-DO-GLU and incubated for 24 hours. Cultures were diluted to an OD₆₀₀ of 0.8 into 6 ml of fresh YNB-DO-GLU and incubated for an additional 7 hours. Cells were harvested by centrifugation at 2000×g for 2 min. Supernatants were decanted and cells were suspended in 2 ml of Tris-EDTA (10 mM Tris-HCl, 1 mM EDTA, pH 8), containing 10 μM of one of the following feeding substrates: (R,S)-norlaudanosoline, (S)-reticuline, (S)-scoulerine or (S)-stylopine. Cells were incubated for 16 hours then harvested by centrifugation at 15000×g for 1 min. For BIA extraction from cells, the cell pellet was suspended in 500 μl methanol with ˜50 μl acid-washed glass beads and vortexed for 30 min. Cell extracts were clarified by centrifugation at 15000×g for 1 min and used directly for LC-MS analysis.

### MRM Analysis of Alkaloids

[0137] Analysis of enzyme assays was performed using an Agilent™ 1200 liquid chromatography system equipped with a 6410 triple-quadrupole mass spectrometer (Agilent Technologies; Santa Clara, Calif.). Ten microliters of the reaction mixtures were separated as described previously²⁵ and the eluate was applied to the mass analyser using the following parameters: capillary voltage, 4000 V; fragmentor voltage, 125 V; source temperature, 350° C.; nebulizer pressure, 50 psi; gas flow, 10 L min⁻¹. Scoulerine, cheilanthifoline, and stylopine were detected in multiple reaction monitoring (MRM) mode using a collision energy of 25 eV and monitored transitions of m/z 328→178, 326→178 and 324→176, respectively.

### FT-MS Analysis of Alkaloids

[0138] Detection of alkaloids in the sanguinarine biosynthetic pathway was performed by FT-MS using a 7T-LTQ FT ICR instrument (Thermo Scientific, Bremen, Germany). Alkaloids were separated by reverse phase HPLC (Perkin Elmer SERIES 200 Micropump, Norfolk, Conn.) using an Agilent Zorbax™ Rapid Resolution HT C18 2.1*30 mm, 1.8 micron column. Solvent A (0.1% acetic acid) and solvent B (100% acetonitrile) were used in a gradient elution to separate the metabolites of interest as follows: 0-1 min at 100% A, 1-6 min 0 to 95% B (linear gradient), 7-8 min 95% B, 8-8.2 min 100% A, followed by a 1 min equilibration at 100% A. Three microliters of either cell extract or supernatant fraction were loaded on the HPLC column run at a flow rate of 0.25 ml/min. Dilutions in methanol were performed to keep alkaloid concentrations within the range of standard curve values and avoid saturating FT signals. Following LC separation, metabolites were injected into the LTQ-FT-MS (ESI source in positive ion mode) using the following parameters: resolution, 100000; scanning range, 250 to 450 AMU; capillary voltage, 5 kV; source temperature, 350° C.; AGC target setting for full MS were set at 5×10⁵ ions. Identification of alkaloids was done using retention time and exact mass (<2 ppm) of the monoisotopic mass of the protonated molecular ion [M+H]⁺. LC-FT-MS data were processed using the freely available program Maven⁵⁶. When available authentic standards were used to confirm the identity of the BIA intermediates (using HPLC retention times and exact masses) and to quantify sanguinarine alkaloids. When unavailable, we assumed equal ionization efficiency between an intermediate and the closest available quantifiable alkaloid (m/z 302 and m/z=316: reticuline; cheilanthifoline: stylopine).

### Example 2

### Isolation and In Vitro Characterization of Cheilanthifoline and Stylopine Synthases from Opium Poppy

[0139] Sanguinarine biosynthesis from (S)-scoulerine proceeds with the formation of two methylenedioxy bridges catalysed by the P450s cheilanthifoline synthase (CFS) and stylopine synthase (SPS), to yield cheilanthifoline and stylopine respectively (FIG. 2). Candidate genes encoding opium poppy (Papaver somniferum) cheilanthifoline synthase (PsCFS) and stylopine synthase (PsSPS) were isolated from assembled opium poppy root and stem transcriptome databases generated using Illumina GA™ sequencing. Query amino acid sequences used to search each database were AmCFS and AmSPS from Argemone mexicana²⁸. The selection of candidate genes was guided by the expectation that PsCFS and PsSPS transcripts would occur exclusively or predominantly in opium poppy roots, owing to the lack of sanguinarine accumulation in stems of the plant²⁹. A PsCFS candidate corresponding to CYP719A25 shared 84% amino acid identity with AmCFS and was expressed exclusively in opium poppy roots (FIG. 3A). A PsSPS candidate corresponding to CYP719A20 shared 79% amino acid identity with AmSPS and was expressed predominantly in roots (FIG. 3A).

[0140] Constructs for the heterologous expression of PsCFS and PsSPS in S. cerevisiae were assembled in a vector harbouring PsCPR (Table 1 above). As PsSPS was poorly expressed (data not shown), the native N-terminal membrane-spanning domain was swapped with that of lettuce germacrene A oxidase, generating recombinant PsSPSΔN. Western blot analysis confirmed expression of the recombinant proteins in yeast (FIG. 3B). Microsomes were isolated from all three strains and incubated in vitro with (S)-scoulerine. Scoulerine was converted to cheilanthifoline in the presence of PsCPR and PsCFS, while scoulerine was converted to cheilanthifoline and stylopine in the presence of PsCPR, PsCFS, and recombinant PsSPSΔN (FIG. 3C). No conversion of scoulerine was detected in the negative control. In Examples 3-8, PsCFS and recombinant PsSPSΔN were used for the reconstitution of dihydrosanguinarine synthesis in S. cerevisiae.

### Example 3

### Reconstitution of the Dihydrosanguinarine Pathway

[0141] The synthesis of sanguinarine from norlaudanosoline requires ten enzymatic reactions (FIG. 2). In reconstitution of the pathway, dihydrobenzophenanthridine oxidase (DBOX) was omitted herein because of its low activity in S. cerevisiae²⁶ and because dihydrosanguinarine is easily oxidized to sanguinarine ex vivo³⁰. The remaining nine reactions were divided into three “blocks” of three sequential enzymes, as illustrated in FIG. 2. Each block was cloned into a separate plasmid and the cytochrome P450 reductase from P. somniferum (PsCPR) was cloned into a fourth plasmid (Table 1 above).

[0142] To confirm functional expression of enzymes, plasmids expressing each of the three blocks were individually transformed into S. cerevisiae and cultures of the strains were supplemented with either (R,S)-norlaudanosoline, (S)-reticuline, (S)-scoulerine or (S)-stylopine. Functional expression was verified by detection of the expected end products. As negative controls, yeast strains lacking enzyme blocks were incubated with each of the pathway intermediate to evaluate substrate recovery and to assess the relative proportion recovered in cellular extracts versus culture supernatants.

### Example 4

### Functional Expression of Individual Enzyme Blocks

[0143] Block 1 contains the P. somniferum enzymes 6-O-methyltransferase (6OMT), coclaurine N-methyltransferase (CNMT), and 4′-O-methyltransferase 2 (4′OMT2), which catalyse three methylation reactions to convert (R,S)-norlaudanosoline to (S)-reticuline. The committed step of BIA synthesis in plants is the condensation of the L-tyrosine derivatives L-dopamine and 4-hydroxyphenylacetaldehyde to produce (S)-norcoclaurine, catalysed by the enzyme (S)-norcoclaurine synthase (NCS) (FIG. 1). The enzymatic synthesis of (S)-norcoclaurine has not yet been achieved in S. cerevisiae, however the 3′-hydroxylated analogue norlaudanosoline can be used to bypass synthesis of (S)-norcoclaurine and the P450 NMCH, N-methylcoclaurine hydroxylase (CYP80B1), during pathway development²². The enzymes 6OMT, CNMT and 4′OMT2 from P. somniferum can be functionally co-expressed in yeast for the synthesis of reticuline from (R,S)-norlaudanosoline²².

[0144] Strain GCY1086, expressing Block 1 enzymes from a plasmid, was incubated with (R,S)-norlaudanosoline. The end product reticuline was produced with a yield of 20% (FIG. 4A and FIG. 5A), twice the previously reported yield²². While Block 1 enzymes are predicted to function in plants in the order depicted in FIG. 1, a multitude of single- and double-methylated products can be formed when these enzymes are expressed in S. cerevisiae and incubated with norlaudanosoline^{22,31,32}. For example, the three methyltransferases expressed in Block 1 can accept norlaudanosoline as a substrate and acceptance of N-methylnorlaudanosoline (laudanosoline) by both 6OMT and 4′OMT2 was also demonstrated²². No single-methylated products (m/z=302) were however detected herein, and the accumulation of double-methylated products (m/z=316) was estimated to be 2%. Low accumulation of intermediates indicated that the limiting reaction of Block 1 is likely the first methylation event. This limitation could be due to the fact that norlaudanosoline is not a natural substrate or that intracellular norlaudanosoline is low due to poor transport. When wild-type cells were incubated with norlaudanosoline, 3% was initially found in the cell extract, which increased to just 10% after 16 hours of incubation (FIG. 6A), suggesting that substrate availability to the intracellular enzymes is low.

### Chiral Analysis of Reticuline

[0145] To investigate the possibility that the reticuline produced from (R,S)-norlaudanosoline by the three opium poppy MTs was not racemic, chiral analysis by HPLC was used to reveal the presence or absence of reticuline enantiomers.

[0146] Separation of the (R)- and (S)-enantiomers of reticuline was performed using the chiral column CHIRALCEL OD-H (4.6×250 mm, Daicel Chemical Industries) and the solvent system hexane:2-propanol:diethylamine (78:22:0.01) at a flow rate of 0.55 ml min^{-1 60}. Following LC separation, metabolites were injected into an LTQ ion trap mass spectrometer (Thermo Electron, San Jose, Calif.) and detected by selected reaction monitoring (SRM). SRM transitions of m/z 288→164.0 (CID@35) and 330→192 (CID@30) were used to detect reticuline. Retention times for reticuline obtained in samples matched retention times observed with authentic standards.

[0147] Chiral analysis of enantio-pure standards of (R)- and (S)-reticuline and of racemic (R,S)-reticuline was first performed to confirm the separation of the two enantiomers (FIGS. 7A, 7B and 7C). Analysis of the reticuline produced by the BBE-expressing strain GCY1359, which was assumed to accumulate (R)-reticuline and convert (S)-reticuline into scoulerine, showed instead that only trace (S)-reticuline remained (FIG. 7D). Finally, chiral analysis of the reticuline produced by strain GCY1086 expressing only the three P. somniferum MTs revealed that only (S)-reticuline was produced (FIG. 7E), demonstrating the strict enantioselectivity of one or more of the three MTs on racemic i.e. (R,S)-norlaudanosoline (FIG. 7F).

[0148] Block 2 contains the P. somniferum enzymes berberine bridge enzyme (BBE), CFS and SPS. In plants, the flavoprotein oxidase BBE stereoselectively converts (S)-reticuline to (S)-scoulerine³³. A truncated version of BBE (PsBBEΔN) was cloned with CFS and recombinant PsSPSΔN into plasmid pGC994 (Table 1). When cells expressing enzymes of Block 2 and CPR (strain GCY1090) were incubated with (S)-reticuline, no scoulerine, cheilanthifoline, or stylopine were detected (FIG. 4A), suggesting that initial conversion of (S)-reticuline to scoulerine was poor. It was hypothesized BBEΔN activity was limiting the flux of Block 2. To assess the function of CFS and recombinant PsSPSΔN, PsBBEΔN was bypassed by feeding the next pathway intermediate, (S)-scoulerine, to the same yeast strain. Here, the accumulation of cheilanthifoline and 19% conversion of scoulerine to stylopine (FIG. 4A and FIG. 5) were observed, confirming that PsBBEΔN was limiting. 70% conversion to cheilanthifoline was estimated using a stylopine standard curve. Cheilanthifoline was mainly found in the supernatant while stylopine was predominantly found in the cell extract (FIG. 6B). Accumulation of cheilanthifoline during cell feeding assays also indicated that low activity of the stylopine synthase was limiting the flux of scoulerine to stylopine.

[0149] The third block encodes the three enzymes catalysing the conversion of stylopine to dihydrosanguinarine. Stylopine is N-methylated to (S)-cis-N-methylstylopine by tetrahydroprotoberberine cis-N-methyltransferase (TNMT)³⁴. The next two biosynthetic steps are catalysed by the P450 hydroxylases (S)-cis-N-methylstylopine 14-hydroxylase (MSH) and protopine 6-hydroxylase (P6H). Both enzymes were recently identified and characterized from P. somniferum and Eschscholzia californica respectively (CYP82N4 and CYP82N2v2)^{25,27}. 6-Hydroxyprotopine spontaneously rearranges to dihydrosanguinarine. When cells expressing Block 3 and CPR (strain GCY1094) were incubated with (S)-stylopine, the majority of the stylopine was consumed, resulting in 57% conversion to dihydrosanguinarine (FIG. 4A and FIG. 5C). N-methylstylopine was the intermediate with the next largest peak area (FIG. 5C) and trace amounts of protopine were detected (not shown). 3% conversion to sanguinarine was also detected indicating spontaneous conversion of dihydrosanguinarine to sanguinarine (not shown).

[0150] Approximately 55% of the pathway intermediate N-methylstylopine (N-st) was found in the culture supernatant as opposed to stylopine (Sty) and dihydrosanguinarine (DHS), which were mostly found in the cellular extract fraction (FIG. 6B). This suggests that the charged intermediate N-methylstylopine (N-st) is secreted outside of the cell, thereby reducing the pathway efficiency.

### Example 5

### Integration of Block 2 and Block 3 in the Genome

[0151] The vectors harbouring Blocks 1, 2, 3, and CPR are closely related and share several of the same promoters and terminators. A loss of function was occasionally observed from strains harbouring multiple plasmids, which was attributed to recombination. To address this problem, Blocks 2 and 3 were integrated into the genome of S. cerevisiae (Table 1 and Table 2). Block 2 was integrated into YORWΔ17(ChrXV). Block 3 was integrated into YPRCΔ15(ChrXVI). The plasmids were single copy.

[0152] Block 2 was integrated into S. cerevisiae and the strain was transformed with CPR (strain GCY1101). When incubated with scoulerine, 14% of the substrate was converted to stylopine, which is comparable to what was obtained by expressing Block 2 from a centromeric plasmid (single copy) (strain GCY1090)(FIG. 4A) Only trace cheilanthifoline and stylopine accumulation was observed in the absence of the heterologously-expressed CPR, indicating the importance of including a cognate CPR for improved cytochrome P450 activity in S. cerevisiae (data not shown).

[0153] Block 3 was integrated into the Block 2 strain, generating a Block 2-Block 3 double integrant, which was subsequently transformed with CPR (strain GCY1104). Incubation of this strain with (S)-scoulerine resulted in 7.5% conversion to dihydrosanguinarine (FIG. 4A and FIG. 6A), which is an 8-fold decrease in dihydrosanguinarine synthesis compared to cells expressing Block 3 enzymes and incubated with (S)-stylopine (FIG. 4A). Similar to previous feeding assays where cells expressed only Block 3 enzymes, the intermediate N-methylstylopine accumulated (FIG. 8A).

### Example 6

### TNMT N-Methylates Scoulerine and Cheilanthifoline

[0154] When cells of the Block 2-Block 3 double integrant were incubated with (S)-scoulerine, compounds with exact masses of 342.1710 m/z and 340.1548 m/z were detected in addition to expected sanguinarine pathway intermediates. These exact masses, and their CIDs, correspond to N-methylscoulerine and N-methylcheilanthifoline, respectively³⁶. The compounds had been previously identified in opium poppy cell culture and were predicted to be a product of TNMT activity, an enzyme that had also been shown to methylate (S)-canadine³⁴. To determine whether TNMT was responsible for the N-methylation of cheilanthifoline and scoulerine, the Block 2 integrant strain harbouring CPR on a plasmid (strain GCY1101) was compared with the Block 2 integrant strain harbouring both CPR and TNMT on a plasmid (strain GCY1127). The resulting chromatograms and CIDs (FIG. 8B) for N-methylscoulerine, N-methylcheilanthifoline, and N-methylstylopine demonstrate that all three compounds are present only in the presence of TNMT. These data provide the first experimental evidence that TNMT accepts both scoulerine and cheilanthifoline as substrates for methylation.

[0155] Because the applicants lacked standards to quantify the N-methylated products and since the three compounds are similar in structure, they assumed equal ionization efficiency and estimated their relative proportions by peak area: when strain GCY1127 is fed (S)-scoulerine, the expected product N-methylstylopine is 33%, while N-methylscoulerine is 7% and N-methylcheilanthifoline is 60% (FIG. 8B). Diversion of the intermediates scoulerine and cheilanthifoline from dihydrosanguinarine synthesis affects the efficiency of the pathway and showed that favouring N-methylation of stylopine will be useful to increase yield to the desired downstream compounds as was confirmed in Examples below.

### Example 7

### Production of Dihydrosanguinarine from Norlaudanosoline

[0156] The three functional blocks were combined to assemble a complete dihydrosanguinarine pathway in yeast. The Block 2-Block 3 integrant served as a background strain for the transformation of Block 1 and CPR (strain GCY1108). When this strain was incubated with (R,S)-norlaudanosoline, trace levels of dihydrosanguinarine were observed (FIG. 4A), along with 13% conversion to reticuline and no other accumulation of downstream intermediates or N-methylated side products (data not shown). Lack of conversion of endogenously synthesized (S)-reticuline to scoulerine confirmed that psBBEΔN was not highly active in the applicant's system, as previously observed by incubating cells expressing Block 2 enzymes with (S)-reticuline (FIG. 4A).

[0157] The applicants co-transformed a high-copy vector expressing psBBEΔN along with Block 1 and CPR plasmids into the double integrant (strain GCY1125). When strain GCY1125 was incubated with (R,S)-norlaudanosoline, conversion to dihydrosanguinarine improved from trace to 1.5% (FIG. 5A) and (S)-reticuline accumulation dropped from 13% to 0.5%, confirming that low psBBEΔN expression was limiting flux. PsBBE was previously proposed to be functionally identical to Eschscholzia californica BBE^{26,37}, which is enantioselective for (S)-reticuline³³.

[0158] Finally, the applicants independently incubated GCY1125 cells with (R,S)-norlaudanosoline, (S)-reticuline, (S)-scoulerine, or (S)-stylopine to assess the efficiency of substrate conversion at different points in the complete pathway (FIG. 4B). In all GCY1125 substrate feeding experiments, spontaneous oxidation of dihydrosanguinarine to sanguinarine was detected, corresponding to 6% of the total dihydrosanguinarine. Feeding (R,S)-norlaudanosoline resulted in 1.5% conversion to dihydrosanguinarine, while bypassing Block 1 using (S)-reticuline resulted in 4% conversion to dihydrosanguinarine. Bypassing PsBBEΔN by incubating the same strain with (S)-scoulerine increased conversion to only 8%. In all cases the accumulation of the N-methylated side-products, especially N-methylcheilanthifoline, diverted intermediates from the dihydrosanguinarine pathway. In fact, the biggest increase in efficiency was observed when strain GCY1125 was incubated with stylopine, bypassing production of scoulerine and cheilanthifoline and their N-methylated products: from 8% to 37%. However, 37% yield is a decrease from the 57% yield observed when Block 3 enzymes were expressed on their own, indicating that expression of Block 1 and 2 negatively affects the yield of Block 3.

### Example 8

### Effect of pH on Yield

[0159] Block 2_Block 3 enzymes were tested in whole cell substrate (GCY1104) feeding assays for the production of dihydrosanguinarine from scoulerine using different buffering conditions (FIG. 9). Yeast growing medium (YNB-DO-GLU) has an initial pH of ˜5, which drops to pH ˜3 during yeast growth.

[0160] A colony of S. cerevisiae was inoculated in YNB-DO-GLU and incubated for 24 hours. Cultures were diluted to an OD₆₀₀ of 0.8 into 6 ml of fresh YNB-DO-GLU and incubated for an additional 7 hours. Cells were harvested by centrifugation at 2000×g for 2 min. Supernatants were decanted and cells were suspended in 2 ml of each of the following media containing 10 μM of of (S)-scoulerine:
[0161] 1. YNB-DO-GLU, pH ˜5 (YNB in the FIG.
[0162] 2. YNB-DO-GLU+10 mM Tris-HCl pH 8 (YNB+10 mM Tris in the FIG.
[0163] 3. YNB-DO-GLU+50 mM Tris-HCl pH 8 (YNB+50 mM Tris in the FIG.
[0164] 4. YNB-DO-GLU+100 mM Tris-HCl pH 8 (YNB+100 mM Tris in the FIG.
[0165] 5. YNB-DO-GLU+50 mM HEPES pH 8 (YNB+50 mM HEPES in the FIG.
[0166] 6. YNB-DO-GLU+10 mM HEPES pH 8 (YNB+100 mM HEPES in the FIG.
[0167] 7. Tris-HCl 10 mM, pH8 (Tris 10 mM in the FIG.
[0168] 8. 10 mM Tris-HCl, 1 mM EDTA, pH 8 (TE 10 mM in the figure). This is the condition used in Examples 1 to 7 herein.

[0169] Cells were incubated for 16 hours and at the end of the feeding the pHs were verified. In sample 1 the pH dropped from 5 to 3 as expected. In sample 2 the pH dropped from 8 to 5, indicating that the buffer strength was not enough to maintain the pH at 8. All other buffers maintained the pH at 8. Extraction of alkaloids and analysis were performed as described above.

[0170] Results shown in FIG. 9 indicate that when final pH is 8, dihydrosanguinarine production is 5 to 8 times higher than at pH 3 or 5. Without being bound by such hypothesis, the applicants submit that more alkaline pHs affect substrate solubilities and therefore availability. pH values indicated in FIG. 9 refer to yeast growing medium, not to yeast cells' internal pH.

### Example 10

### Effect of pH on Sanguinarine Pathway BIA Synthesis

[0171] Additional pHs of 3, 6, 7, 8, 9 were tested on the individual Blocks 1, 2 and 3 and on the three Blocks 1-2-3 combined in GCY1125 in order to evaluate the effect of pH on sanguinarine pathway BIA synthesis and recovery.

[0172] A variety of media was used: the yeast media YNB, which has a starting pH of about 5.5 but decreases to about pH 3 upon fermentation; 10 mM Sørenson's phosphate buffer, pH 6.0; TE buffer pH 7.0 (10 mM Tris, 1 mM EDTA), TE buffer pH 8.0 (10 mM Tris, 1 mM EDTA), and TE buffer pH 9.0 (10 mM Tris, 1 mM EDTA). Yeast expressing no heterologous BIA pathway enzymes were inoculated in YNB with appropriate supplementation overnight, back-diluted 1:10 in 96-well deep-well plates, allowed to grow for 7 h and concentrated 3× in incubation media containing 5 uM of either (R,S)-norlaudanosoline, (S)-scoulerine, or (S)-stylopine. After 16 hours, supernatant was recovered and diluted 1:2 in MeOH before analysis by HPLC-FT-MS. In addition, cell pellets were resuspended in MeOH and vortexed for 30 minutes before analysis by HPLC-FT-MS.

[0173] Total recovery of BIAs was not consistent across all pHs, nor was it consistent across all BIAs. (R,S)-norlaudanosoline recovery was highest in YNB, and dropped as pH increased, until at pH 9, no norlaudanosoline was recovered (FIG. 21A). (S)-scoulerine recovery remained consistent across YNB to pH 8, even increasingly slightly at pH 6 and 7; recovery dropped at pH 9 (FIG. 21B). (S)-stylopine recovery was highest in YNB, but remained consistent between pH 6 and 9 (FIG. 21C). All three supplemented BIAs showed high recovery in YNB and lower recovery at higher pHs.

[0174] BIAs were not recovered equally from supernatant and cell extract, nor was recovery consistent across the pH range from 3-9. While for (R,S)-norlaudanosoline recovery in cell extract remained within 3-5% across all pHs, (S)-scoulerine and (S)-stylopine recovery in cell extract increased with pH (FIG. 22A, B, C). However, recovery from supernatant tended to decrease as pH increased, and this decrease was not matched by an increase in recovery in cell extract; hence, total recovery tended to drop as pH increased. In summary, incubation of BIAs at pHs above 7 was unfavourable for recovery of supplemented BIAs.

[0175] In contrast to recovery studies, activity assays tended to favour higher pHs. Yeast expressing Block 1 (GCY1086), Block 2 and PsCPR (GCY1090), or Block 3 and PsCPR (GCY1094) were inoculated overnight, back-diluted 1:10 in 96-well deep-well plates, allowed to grow for 7 h and concentrated 3× in incubation media containing 5 uM of (R,S)-norlaudanosoline (FIG. 23A), (S)-scoulerine (FIG. 23B), or (S)-stylopine (FIG. 23C), respectively. After 16 hours, supernatant was recovered and diluted 1:2 in MeOH before analysis by HPLC-FT-MS. In addition, cell pellets were resuspended in MeOH and vortexed for 30 minutes before analysis by HPLC-FT-MS. As some intermediates did not have a standard available for quantification, pathway conversion was measured as a molar ratio between product recovered and substrate added. In YNB, there was no detectable conversion of norlaudanosoline to reticuline. Conversion increased from 13% at pH 6 to 41% at pH 9. Similarly, the Block 2 end product stylopine was not observed when cells were incubated in YNB. Increasing the pH to 6 increased yields to 17%, while increasing pH further increased yields to 43% at pH 9. In contrast, the highest conversion of stylopine to dihydrosanguinarine and sanguinarine was 75% in YNB. At pH 6, conversion dropped to 35% and remained consistent as pH rose.

[0176] Poor recovery of (R,S)-norlaudanosoline at pHs greater or equal to 6 suggests degradation, perhaps by oxidation as hypothesized by Kim et al 2013⁷¹. They observed higher conversion of fermented (S)-norlaudanosoline to (S)-reticuline at pH 6 than pH 8. While the Applicant observed that norlaudanosoline is highly affected by higher pHs, conversion of norlaudanosoline towards downstream products is also higher at these pHs, thus preventing oxidation. Kim et al.⁷¹ was supplementing dopamine, which must be enzymatically condensed with its derivative 3,4-dHPAA to form norlaudanosoline; it is possible that this enzymatic step provided an extra bottleneck which led to increased oxidation.

[0177] The effect of higher pHs on Block 1 and Block 2 conversion was remarkably similar: 0% activity in YNB, 10-25% activity in pHs 6 and 7, and activity levelling off at ˜40% at pHs 8 and 9. In contrast, Block 3 was most active in YNB, where 75% of stylopine was converted into dihydrosanguinarine and sanguinarine. This suggests that a two-step fermentation could be performed, with a higher pH to promote conversion to stylopine, followed by a lower pH to promote conversion to dihydrosanguinarine and sanguinarine.

### Example 10

### Increasing the Activity of SPS and CFS

[0178] The present invention encompasses increasing the activity of SPS and CFS, and thus the flux of alkaloids towards sanguinarine. Orthologous genes from different plants can have varying kinetic constants and expression efficiency in yeast.

[0179] There are 14 enzyme families and 300 genes in the BIA gene order. The cheilanthifoline and stylopine synthases belong to the CYP719 family.

[0180] The Applicant purchased all published CYP719s (including those without published activities). Published CYP719 protein sequences were used as queries for a tblastx™ search of the PhytoMetaSyn™ transcriptome database. The interface for BLAST was on PhytoMetaSyn™'s website. Protein sequences with percent similarity of 55% or greater to published CYP719s were saved for downstream analysis.

[0181] In parallel with the BLAST approach, PhytoMetaSyn™'s transcriptome data (RNA) was downloaded and converted into predicted ORFs (protein) using the OrfPredictor algorithm developed in Dr. Tsang's laboratory at Concordia University⁶³. Two motifs were used to search the database of predicted PhytoMetaSyn™ ORFs. The first was the highly conserved heme-binding motif FXXGXRXC (SEQ ID NO: 481). The second was a common N-terminal hydrophobic region downstream of the membrane-anchor sequence, found to be conserved amongst published CYP719s: P(hydrophobic)(hydrophobic)GN⁶⁴. Protein sequences containing both motifs of interest were saved for downstream analysis.

[0182] Predicted ORFs identified through the tblastx™ search and/or motif searches described above were sorted into CYP families by percent sequence identity using the program BLAST-CLUST™ (http://toolkit.tuebingen.mpg.de/blastclust). BLAST-CLUST™ requires two inputs: “sequence length to be covered” and “percent identity threshold”. Sequence length was set to 95% to allow for variability in identity and length of membrane-anchor sequences. Percent identity was set to 40% because the CYP nomenclature committee defines CYP families as CYPs with 40% identity or more⁶⁴. All published CYP719s cluster together using these settings. Predicted ORFs that clustered with published CYP719s were selected for further analysis. Additional outliers were discarded using Clustal Omega™'s multiple sequence alignment, and phylogenetic trees were generated using the program MEGA6™⁶⁵ (See FIG. 10C-G).

[0183] The Applicant ordered 42 CYP719s from the PhytoMetaSyn™ database, along with 19 published CYP719s, from the DNA synthesis company Gen9 (referred to herein as “purchased CYP719”). A phylogenetic tree of the ordered sequences is presented in FIG. 10C. The CYP719s were pre-cloned by Gen9 into the pBOT-TRP vector built by the Martin lab (FIG. 24).

[0184] The pBOT vector system is modular and flexible, and can be used to synthesize an unlimited number and type of vector backbones. Each vector feature is amplified individually, flanked by 40 bp linkers such that features can be combined via cloning methods relying on homologous regions of DNA. Any number of features can be used, depending on the nature of linkers used. Features used in the pBOT-TRP vector were: 1) E. coli antibiotic resistance and origin of replication; 2) yeast origin of replication; 3) yeast antibiotic resistance; 4) yeast auxotrophy; and 5) expression cassette.

[0185] The four basic pBOT vectors contain unique promoter and terminator combinations, allowing for cassette assembly via cloning methods relying on homologous regions of DNA. Genes were directionally cloned into pBOT expression cassettes as GFP fusion proteins via the type II restriction enzyme SapI. Protein expression can be measured indirectly via GFP fluorescence. GFP can be removed by digestion with KasI followed by dilution and religation, resulting in a functional expression cassette with a two amino acid scar (glycine-alanine) at the C terminus of the gene. The four pBOT versions available contain a different auxotrophy (LEU, URA, HIS or TRP) and different promoter-terminator pairs associated with each auxotrophy. Any gene of interest can be cloned by SapI restriction digestion and ligation. Target genes are PCR amplified using primers that add a SapI site at the 5′ and at the 3′ as follows: 5′-GCTCTTCTACA (SEQ ID NO: 565)-GENE-GGCTGAAGAGC-3′ (SEQ ID NO: 566). Digestion of vector generates 5′ overhangs on vector (TGT and GGC) which complement designed 5′ overhangs on digested gene sequences (ACA and CCG). Ligation of SapI digested plasmid and target gene will reconstitute a functional Kozak sequence at the 5′ of the gene (AAACA (SEQ ID NO: 567) followed by the ATG first codon and no extra UTRs region added as described. A linker of 36 nucleotides (12 amino acids) between the gene and the GFP in present.

[0186] To broadly identify CYP719 activities on BIAs, a substrate affinity test was performed with the protoberberine BIA scoulerine. CYP719s have been described to form methylenedioxy bridges on BIAs from an alcohol group and a methyl group on adjacent carbons. Two different rings can be made on scoulerine, which can be called “Ring A” and “Ring B”, with the BIA products being called “nandinine” and “cheilanthifoline”, respectively (see FIG. 19). CYP719-catalyzed formation of both Ring A and Ring B of scoulerine (“Ring A-closing activity” and “Ring B-closing activity”) has been identified and published. Certain CYP719 enzymes included in the affinity tests have published ring A and Ring B activities. See Table 8 below.

[0187] Plasmids harboring CYP719s were transformed into either GC1333 containing an integrated PsCPR (FIG. 10A) or GC1316 containing an integrated PsCPR and an integrated PsCFS (FIG. 10B). Strain GC1333, harboring PsCPR integrated into the chromosome, was transformed with pBOT plasmids, with GFP removed, harboring individual CYP719s (CYP719 EX41-105). (See Tables 7-8 below presenting the nature and activity of these CYP719s).

TABLE 7
List of CYP719s identified herein

| | | Source | | | |
|---|---|---|---|---|---|
| | | | Available online | | |
| Name | Species | PhytoMetaSyn ™ | Genbank | Accession | CYP name |
| EX41 | Argemone mexicana | | Y | B1NF20.1 | CYP719A14 |
| EX42 | Argemone mexicana | | Y | B1NF19.1 | CYP719A13 |
| EX43 | Aquilegia formosa | | N | http://drnelson.uthsc.edu/biblioD.html | CYP719A6 |
| EX44 | Aquilegia formosa | | N | http://drnelson.uthsc.edu/biblioD.html | CYP719A7 |
| EX45 | Corydalis cheilanthifolia | Y | | | |
| EX46 | Corydalis cheilanthifolia | Y | | | |
| EX47 | Corydalis cheilanthifolia | Y | | | |
| EX48 | Corydalis cheilanthifolia | Y | | | |
| EX49 | Coptis chinensis | | Y | AGL76711.1 | n/a |
| EX50 | Coptis japonica | | Y | Q948Y1.1 | CYP719A1 |
| EX51 | Coptis japonica | | Y | BAF98470.1 | CYP719A18 |
| EX52 | Coptis japonica | | Y | BAF98471.1 | CYP719A19 |
| EX53 | Chelidonium majus | Y | | | |
| EX54 | Chelidonium majus | Y | | | |
| EX55 | Chelidonium majus | Y | | | |
| EX56 | Chelidonium majus | Y | | | |
| EX57 | Cissampelos mucronata | Y | | | |
| EX58 | Cissampelos mucronata | Y | | | |
| EX59 | Eschscholzia californica | | Y | B5UAQ8.1 | CYP719A5 |
| EX60 | Eschscholzia californica | | Y | BAG75114.1 | CYP719A9 |
| EX61 | Eschscholzia californica | | Y | Q50LH3.1 | CYP719A2 |
| EX62 | Eschscholzia californica | | Y | Q50LH4.1 | CYP719A3 |
| EX63 | Eschscholzia californica | | Y | BAG75115.1 | CYP719A11 |
| EX64 | Eschscholzia californica | | Y | BAG75116.1 | CYP719A17 |
| EX65 | Glaucium flavum | Y | | | |
| EX66 | Glaucium flavum | Y | | | |
| EX67 | Glaucium flavum | Y | | | |
| EX68 | Hydrastis canadensis | Y | | | |
| EX69 | Mahonia aquifolium | Y | | | |
| EX70 | Menispermum canadense | Y | | | |
| EX71 | Nandina domestica | Y | | | |
| EX72 | Nandina domestica | Y | | | |
| EX73 | Nandina domestica | Y | | | |
| EX74 | Nandina domestica | Y | | | |
| EX75 | Nandina domestica | Y | | | |
| EX76 | Nandina domestica | Y | | | |
| EX77 | Nelumbo nucifera | | | XP_010267084 | CYP719A22 |
| EX78 | Papaver bracteatum | Y | | | |
| EX79 | Papaver bracteatum | Y | | | |
| EX80 | Papaver bracteatum | Y | | | |
| EX81 | Podophyllum peltatum | | Y | AGC29954.1 | CYP719A24 |
| EX82 | Papaver somniferum | Y | | | |
| EX83 | Papaver somniferum | | Y | AFB74615.1 | CYP719A21 |
| EX84** | Papaver somniferum | | Y | ADB89213.1 | PsCFS |
| EX85 | Papaver somniferum | | Y | B1NF18.1 | CYP719B1 |
| EX86 | Papaver somniferum | Y | | | |
| EX87 | Papaver somniferum | Y | | | |
| EX88 | Papaver somniferum | Y | | | |
| EX89 | Papaver somniferum | Y | | | |
| EX90 | Papaver somniferum | Y | | | |
| EX91 | Papaver somniferum | Y | | | |
| EX92 | Papaver somniferum | Y | | | |
| EX93 | Papaver somniferum | Y | | | |
| EX94 | Papaver somniferum | | Y | Derived from AHF65153.1 | PsSPSΔN |
| EX95 | Sanguinaria canadensis | Y | | | |
| EX96 | Sanguinaria canadensis | Y | | | |
| EX97 | Sanguinaria canadensis | Y | | | |
| EX98 | Stylophorum diphyllum | Y | | | |
| EX99 | Stylophorum diphyllum | Y | | | |
| EX100 | Stylophorum diphyllum | Y | | | |
| EX101 | Stylophorum diphyllum | Y | | | |
| EX102 | Sinopodophyllum hexandrum | | Y | AGC29953.1 | CYP719A23 |
| EX103 | Thalictrum flavum | | Y | AAU20771.1 | CYP719A4 |
| EX104 | Thalictrum flavum | Y | | | |
| EX105 | Xanthorhiza simplicissima | Y | | | |

TABLE 8
Activity of CYP719s

| | | | Activity: Ring A | | | | | | |
|---|---|---|---|---|---|---|---|---|---|
| | | | | | Tetrahydro- | Activity: Ring B | | | |
| Published CYP719s | | | Scoulerine | Cheilanthifoline | columbamine | Scoulerine | Nandinine | | |
| | | Published | to | to | to | to | to | | Citations |
| Name | Species | activities | nandinine | stylopine | canadine | cheilanthifoline | stylopine | Activity: Other | (activity) |
| EX41 | Argemone | Y | | | | Y | | | Diaz Chavez et |
| | mexicana | | | | | | | | al 2011²⁸ |
| EX42 | Argemone | Y | Y | Y | Y | | | Coreximine to | Diaz Chavez |
| | mexicana | | | | | | | coreximine | et al 2011²⁸ |
| | | | | | | | | product | |
| EX43 | Aquilegia | N | | | | | | | unpublished |
| | formosa | | | | | | | | |
| EX44 | Aquilegia | N | | | | | | | unpublished |
| | formosa | | | | | | | | |
| EX49 | Coptis chinensis | N | | | | | | | unpublished |
| EX50 | Coptis japonica | Y | | | Y | N | | | Ikezawa 2003⁷³ |
| EX51 | Coptis japonica | N | | | | | | | unpublished |
| EX52 | Coptis japonica | N | | | | | | | unpublished |
| EX59 | Eschscholzia | Y | | | | Y | | | Ikezawa 2009⁶⁶ |
| | californica | | | | | | | | |
| EX60 | Eschscholzia | Y | | | | | | (S)-Reticuline | Ikezawa 2009⁶⁶ |
| | californica | | | | | | | to reticuline | |
| | | | | | | | | | product |
| EX61 | Eschscholzia | Y | Y | Y | N | N | | | Ikezawa 2007³⁹ |
| | californica | | | | | | | | |
| EX62 | Eschscholzia | Y | Y | Y | Y | N | | | Ikezawa 2007³⁹ |
| | californica | | | | | | | | |
| EX63 | Eschscholzia | N | | | | | | | Ikezawa 2009⁶⁶ |
| | californica | | | | | | | | |
| EX64 | Eschscholzia | N | | | | | | | Ikezawa 2009⁶⁶ |
| | californica | | | | | | | | |
| EX77 | Nelumbo nucifera | N | | | | | | | Nelson 2013 |
| EX81 | Podophyllum | Y | | | | | | Matairesinol to | Marques |
| | peltatum | | | | | | | pluviatolide | 2013⁶⁷ |
| EX83 | Papaver | Y | | | Y | | | | Dang 2014⁶⁸ |
| | somniferum | | | | | | | | |
| EX84 | Papaver | Y | | | | Y | | | Fossati 2014⁷⁴ |
| | somniferum | | | | | | | | |
| EX85 | Papaver | Y | | | | | | (R)-Reticuline | Gesell 2009⁶⁹ |
| | somniferum | | | | | | | to salutaridine | |
| EX94 | Papaver | Y | | Y | | | | | Fossati 2014⁷⁴ |
| | somniferum | | | | | | | | |
| EX102 | Sinopodophyllum | Y | | | | | | Matairesinol to | Marques |
| | hexandrum | | | | | | | pluviatolide | 2013⁶⁷ |
| EX103 | Thalictrum | N | | | | | | | Samanani 2005 |
| | flavum | | | | | | | | |

[0188] The resulting CYP719-harboring strains (strains SF41-105) were supplemented with scoulerine. After 16 hours, BIAs were extracted and the molar ratio of scoulerine to downstream BIAs was calculated (FIG. 10A).

[0189] 10 of the 61 assayed CYP719s were observed to convert scoulerine into cheilanthifoline (Ring B closers) (EX41, EX45, EX54, EX59, EX65, EX74, EX84, EX95, EX98 and EX99). All 10 converted over 95% of scoulerine to the Ring B product cheilanthifoline. 23 of the 61 assayed CYP719s converted at least 5% of supplemented scoulerine to the Ring A product nandinine. 10 of 23 converted over 95% of scoulerine to nandinine. This could indicate that while scoulerine was accepted, it was not a preferred substrate for the other 13 Ring A-closing CYP719s.

[0190] The 10 CYP719s capable of Ring A closure of >95% of scoulerine (EX42, EX50, EX56, EX60, EX67, EX69, EX72, EX76, EX96 and EX101), along with several other purchased CYP719s with a range of Ring A-closing activity on scoulerine from 0% to 89% (EX44, EX46, EX47, EX48, EX58, EX61, EX66, EX103 and EX105) were introduced to the Block 2 pathway and tested for affinity for cheilanthifoline. Plasmids harboring individual CYP719s were transformed into strain GC1316, which harbored PsCPR and PsCFS integrated into the genome. Strains were supplemented with scoulerine and after 16 hours total BIAs were extracted and the molar ratio was compared (FIG. 10B). The four possible BIAs that could be extracted were scoulerine, the single Ring A product nandinine, the single Ring B product cheilanthifoline, and the double Ring A, Ring B product stylopine. Scoulerine was not observed, because PsCFS alone converted 100% of scoulerine to cheilanthifoline. >98% conversion of scoulerine to stylopine was observed in strains expressing PsCFS and either EX46 or EX61. The rest of the samples displayed a range of ratios of nandinine:cheilanthifoline:stylopine. Residual nandinine in many of the samples, especially that of the strain expressing PsCFS and EX60, indicated that PsCFS had little to no activity on nandinine.

[0191] Because nandinine was not a preferred substrate of PsCFS, most stylopine was generated from cheilanthifoline. Therefore, the ratio of nandinine:cheilanthifoline:stylopine was affected by two factors. The first factor was the acceptance of cheilanthifoline by Ring A-closing CYP719s. Of the 10 CYP719s capable of 95% Ring A closure of scoulerine, residual cheilanthifoline was detected in three (EX50, EX60, EX72). Conversely, EX46 was capable of just 66% Ring A closure of scoulerine (see FIG. 10A) and EX61 was capable of 90% ring closure of scoulerine (FIG. 10A), but when combined with PsCFS, both combinations yielded >98% conversion to stylopine. Using scoulerine as an initial screen for Ring A-closing activity had moderate predictive success.

[0192] The second factor affecting the ratio of nandinine:cheilanthifoline:stylopine was the relative rate of activity of Ring A and Ring B closure. Scoulerine was a substrate for both Ring A closure and Ring B closure. If Ring A closure occurred at a greater rate than Ring B closure, nandinine was produced, which accumulated. If Ring B closure occurred at a greater rate than Ring A closure, cheilanthifoline was produced, which either accumulated or was converted to stylopine depending on the specificity of the Ring A-closing CYP719. Ring B closure has previously been observed to occur at a higher rate than Ring A closure in the CYP719s of Argemone mexicana (EX41 vs. EX42)²⁸. It is this difference in Ring A and Ring B closure rates that results in cheilanthifoline accumulation in vivo, which is then a substrate for TNMT to generate the undesirable side product N-methylcheilanthifoline.

[0193] To optimize the turnover of scoulerine to stylopine, there were two options considered. First, a Ring A-closing CYP719 that did not synthesize nandinine could be identified, avoiding the nandinine side-product. However, most CYP719s predicted to close Ring A of various protoberberines were able to accept scoulerine, limiting the number of Ring A-closers available to compare relative rates of activity in vivo. Alternatively, a Ring B-closing CYP719 could be identified which could accept both scoulerine and nandinine. Consequently, the Ring A product nandinine would no longer be a dead-end but an intermediate. As a result, any CYP719 capable of closing Ring A on scoulerine and/or cheilanthifoline would be a potential candidate for pathway optimization.

[0194] The 10 CYP719s with 95% activity on Ring A of scoulerine and the 10 CYP719s with activity on Ring B of scoulerine were tested for activity on cheilanthifoline and nandinine, respectively, in order to generate a branched stylopine synthesis pathway. As the Applicant did not have pure cheilanthifoline or nandinine, it generated these compounds through in vivo conversion of scoulerine. CYP719s PsCFS and EX101, capable of converting >98% of scoulerine to cheilanthifoline and nandinine, respectively, were incubated with scoulerine. After 16 h, cells were pelleted and the supernatant fraction was collected. The supernatant was then applied to fresh yeast strains in order to supplement them with either TE containing nandinine or cheilanthifoline as necessary.

[0195] 7 of 10 CYP719s with >95% activity on Ring A of scoulerine converted >98% of cheilanthifoline to stylopine: EX42, EX50, EX56, EX67, EX76, EX96, EX101 (FIG. 11A). In addition, PsSPSΔN also converted >98% of cheilanthifoline to stylopine. 2 of 10 CYP719s with >98% activity on Ring B of scoulerine converted Ring B-closers converted >98% of nandinine to stylopine: EX54 and EX98 (FIG. 11B). In comparison, strain GC1316 with PsCFS and CPR integrated into the genome converted 12% of nandinine to stylopine (FIG. 11B). The 7 CYP719s with activity on Ring A, and 2 CYP719s with activity on Ring B were chosen for combinatorial tests in the presence of TNMT to determine relative rates of activity in vivo. Table 9 below show CYP719 Ring A-/Ring B closing activities disclosed in FIGS. 10A-B and 11A and B.

TABLE 9
illustrative purchased CYP719 Ring A-/Ring B closing
activities disclosed in FIGS. 10A-B and 11A and B.

| | | Scoulerine | Cheilanthifoline | Scoulerine to | Nandinine |
|---|---|---|---|---|---|
| Name | Species | to nandinine | to stylopine | cheilanthifoline | to stylopine |
| EX41 | Argemone mexicana | | | X | |
| EX42 | Argemone mexicana | X | X | | |
| EX43 | Aquilegia formosa | X | | | |
| EX44 | Aquilegia formosa | X | | | |
| EX45 | Corydalis cheilanthifolia | | | X | |
| EX46 | Corydalis cheilanthifolia | X | X | | |
| EX47 | Corydalis cheilanthifolia | X | | | |
| EX48 | Corydalis cheilanthifolia | X | X | | |
| EX49 | Coptis chinensis | | | | |
| EX50 | Coptis japonica | X | X | | |
| EX51 | Coptis japonica | | | | |
| EX52 | Coptis japonica | | | | |
| EX53 | Chelidonium majus | | | | |
| EX54 | Chelidonium majus | | | X | X |
| EX55 | Chelidonium majus | X | | | |
| EX56 | Chelidonium majus | X | X | | |
| EX57 | Cissampelos mucronata | | | | |
| EX58 | Cissampelos mucronata | | | | |
| EX59 | Eschscholzia californica | | | X | |
| EX60 | Eschscholzia californica | X | | | |
| EX61 | Eschscholzia californica | X | X | | |
| EX62 | Eschscholzia californica | | | | |
| EX63 | Eschscholzia californica | | | | |
| EX64 | Eschscholzia californica | | | | |
| EX65 | Glaucium flavum | | | X | |
| EX66 | Glaucium flavum | X | | | |
| EX67 | Glaucium flavum | X | X | | |
| EX68 | Hydrastis canadensis | X | | | |
| EX69 | Mahonia aquifolium | X | | | |
| EX70 | Menispermum canadense | | | | |
| EX71 | Nandina domestica | | | | |
| EX72 | Nandina domestica | X | | | |
| EX73 | Nandina domestica | | | | |
| EX74 | Nandina domestica | | | X | |
| EX75 | Nandina domestica | | | | |
| EX76 | Nandina domestica | X | X | | |
| EX77 | Nelumbo nucifera | | | | |
| EX78 | Papaver bracteatum | | | | |
| EX79 | Papaver bracteatum | | | | |
| EX80 | Papaver bracteatum | X | | | |
| EX81 | Podophyllum peltatum | | | | |
| EX82 | Papaver somniferum | | | | |
| EX83 | Papaver somniferum | | | | |
| EX84** | Papaver somniferum | | | X | |
| EX85 | Papaver somniferum | | | | |
| EX86 | Papaver somniferum | | | | |
| EX87 | Papaver somniferum | | | | |
| EX88 | Papaver somniferum | | | | |
| EX89 | Papaver somniferum | | | | |
| EX90 | Papaver somniferum | | | | |
| EX91 | Papaver somniferum | | | | |
| EX92 | Papaver somniferum | | | | |
| EX93 | Papaver somniferum | | | | |
| EX94* | Papaver somniferum | | | | |
| EX95 | Sanguinaria canadensis | | | X | |
| EX96 | Sanguinaria canadensis | X | X | | |
| EX97 | Sanguinaria canadensis | X | | | |
| EX98 | Stylophorum diphyllum | | | X | X |
| EX99 | Stylophorum diphyllum | | | X | |
| EX100 | Stylophorum diphyllum | | | | |
| EX101 | Stylophorum diphyllum | X | X | | |
| EX102 | Sinopodophyllum hexandrum | | | | |
| EX103 | Thalictrum flavum | X | | | |
| EX104 | Thalictrum flavum | | | | |
| EX105 | Xanthorhiza simplicissima | X | | | |

[0196] All CYP719s having been ordered pre-cloned into the same expression vector: pBOT-TRP, plasmids harboring CYP719s could not be co-transformed until some enzymes were expressed from a different auxotrophies. The pBOT expression cassettes were designed to be excisable via the restriction enzymes AscI and NotI. Therefore, pBOT-LEU was digested with AscI and NotI, and the expression cassettes of P1E6 and P2A2 were liberated from pBOT-TRP backbones via AscI and NotI digestion. Religation and transformation resulted in P1E6 and P2A2 expressed from pBOT-LEU. As a result, all CYP719s were ready for combinatorial testing.

[0197] CYP719s capable of closing Ring A and Ring B were co-transformed into either GC1333, harbouring PsCPR integrated into the genome (FIG. 12A), or GC1270, harbouring PsCPR and TNMT integrated into the genome (FIG. 12B). Conversion of scoulerine to stylopine could be compared for each combination, as well as competition for substrates between CYP719 and TNMT. All strains were incubated for 16 h with scoulerine, and then total BIAs were extracted and ratios were compared.

[0198] When expressed individually, all Ring A-closing CYP719s converted >98% of scoulerine to nandinine, and all Ring B-closing CYP719s converted >98% of scoulerine to cheilanthifoline (FIG. 12A). When expressed in combination, all combinations of Ring A- and Ring B-closing CYP719s resulted in >98% stylopine (FIG. 12A).

[0199] When individual CYP719s with Ring B-closing activity were expressed in combination with TNMT, >98% of scoulerine was converted to N-methylcheilanthifoline (FIG. 12B). This indicates that the rate of CYP719-catalyzed methylenedioxy bridge formation was quicker than the rate of TNMT-catalyzed methylation of scoulerine (FIG. 12B). When individual CYP719s with Ring A-closing activity were expressed in combination with TNMT, a range of ratios of N-methylnandinine: N-methylscoulerine was observed, from 1% to 12% N-methylnandinine (FIG. 12B). When combinations of CYP719s with both Ring A and Ring B-closing activity were expressed in the presence of TNMT, a range of ratios of N-methylcheilanthifoline: N-methylstylopine were observed (FIG. 12B). Combinations of CYP719s with both Ring A and Ring B-closing activity in the presence of TNMT resulted in a range of ratios of N-methylstylopine: N-methylcheilanthifoline. In the presence of TNMT, 4 CYP719s with Ring A-closing activity, expressed in combination with either CYP719 with Ring B-closing activity, were capable of converting >98% of supplemented scoulerine to N-methylstylopine (FIG. 12B) (namely the combination of either EX54 or EX98 with either of EX67, EX76, EX96 or EX101).

[0200] The side-product N-methylcheilanthifoline was not observed (<2% of extracted BIAs) when scoulerine was supplemented to yeast expressing various combinations of CYP719s with Ring A-closing and Ring B-closing activity in the presence of TNMT. Several combinations of CYP719s (e.g., EX54 and EX98 against EX42, EX50, EX67, EX76 and EX101) are expressed in the presence of Block 3 (TNMT, MSH, P6H) and supplemented with scoulerine in order to observe downstream products in the presence of a larger number of heterologous enzymes. Yields are expected to increase when these genes are combined with the rest of the sanguinarine pathway as described herein.

[0201] The screens of purchased CYP719s herein have been focused on the synthesis of N-methylstylopine for the purpose of optimization of dihydrosanguinarine yields. In the process, combinations of TNMT and purchased CYP719s were used to efficiently generate a variety of N-methylated and unmethylated protoberberines: cheilanthifoline, nandinine, stylopine, N-methylscoulerine, N-methylnandinine, N-methylcheilanthifoline, and N-methylstylopine.

[0202] Other activities of CYP719s on protoberberines have previously been published, such as the Ring A closure of scoulerine-derived tetrahydrocolumbamine to produce canadine. Scoulerine is methylated by scoulerine O-methyl transferase (SOMT) to generate tetrahydrocolumbamin⁷². CYP719-catalyzed Ring A-closing of tetrahydrocolumbamine produces canadine, which can be methylated by TNMT to generate N-methylcanadine, a precursor to noscapine. The presence of both a Ring A-closing CYP719 and TNMT in this pathway will also require CYP719 optimization for efficient yields of noscapine in a microbial host.

### Example 11

### Generation Fo (R)-Reticuline

[0203] The major route for the synthesis of (R)-reticuline in P. somniferum is considered to be epimerization from (S)-reticuline, which was proposed to proceed via dehydrogenation of (S)-reticuline to 1,2-dehydroreticuline and subsequent enantioselective reduction to (R)-reticuline. However, the genes encoding these enzymes have never been cloned and those reaction never fully characterized⁶⁰⁻⁶¹. It should however be noted that (R)-reticuline is not the only (R)-BIA intermediate found in Ranunculales⁶². This suggests the possibility of an alternative pathway for the synthesis of (R)-intermediates, possibly the existence of enzymes selective for the (R)-enantiomers from the very beginning of the reticuline synthesis pathway. For example, both (S)- and (R)—N-methylcoclaurine were isolated in Berberis stolonifera. These two enantiomers of N-methylcoclaurine are required by the cytochrome P450 berbamunine synthase for the synthesis of berbamunine in Berberis stolonifera⁶².

[0204] While P. somniferum does not make (R,S)-norlaudanosoline, results presented herein indicate that only (S)-reticuline is produced from racemic norlaudanosoline using opium poppy's native methyltransferases. Some evidence for the enantioselectivity of MTs involved in BIA synthesis can be found in the literature. For example, a study reporting on the activity of Coptis japonica MTs for the production of reticuline from racemic norlaudanosoline in engineered E. coli reported a prevalent synthesis of (S)-reticuline over (R)-reticuline¹⁸. This data clearly indicated that some of the C. japonica MTs have a preference for the (S)-enantiomer with limited activity on the (R)-enantiomer. It is therefore possible that MTs strictly enantioselective for the (R)-enantiomer exist and the epimerization to the (R)-enantiomers happens upstream reticuline.

### Example 12

### Increasing the Activity of P450s

[0205] Cytochrome b5 has been reported to enhance activity of certain cytochrome P450s⁴⁸. Tuning expression of the four P450s, CPR and cognate cytochrome b5 could increase pathway efficiency. The impact of cytochrome b5 on yield is tested by expressing b5 in a plasmid or integrated in a chromosome in host cells expressing block(s) 1, 1-2, 2-3 or 1-2-3.

### Example 13

### Increasing the Yield of Block 2-Block 3

[0206] The high number of P450s expressed the cells may be affecting yields of dihydrosanguinarine. (S)-Scoulerine fed to Block 2-Block 3 integrant strains expressing four P450s yielded the same conversion to dihydrosanguinarine whether or not Block 1 and BBEΔN-2μ were expressed (7.5% vs. 7.7; FIG. 3). In contrast, conversion of the fed substrate (S)-stylopine to dihydrosanguinarine dropped from 57% when Block 3 enzymes were expressed in isolation to 37% when Block 3 enzymes were co-expressed with Block 1, BBEΔN-2μ and integrated Block 2. Because Block 1 and BBEΔN-2μ do not appear to affect yields, the applicants hypothesize that it was the co-expression of Block 2 with Block 3 that was responsible for this decrease in yields. Further, because these two strains were fed stylopine, the promiscuity of TNMT is not responsible for this decrease. This suggests that the co-expression of the four P450s in Blocks 2 and 3 in GCY1125 is not optimal for pathway efficiency.

### Example 14

### Increasing Specificity of TNMT

[0207] Synthesis of the side products N-methylcheilanthifoline and N-methylscoulerine by TNMT was shown to be a major limiting factor in the reconstituted pathway. Promiscuity is a common theme among enzymes involved in plant specialized metabolism and is one of the factors contributing to the great chemodiversity of plant secondary metabolites⁴¹. While broad substrate specificity of PsTNMT had been previously described³⁴, the applicants present the first experimental evidence of its acceptance of scoulerine and cheilanthifoline as substrates. The present invention encompasses the use of orthologous plant TNMT enzymes with narrower substrate specificity, enzyme engineering⁴², mutagenesis, substrate channeling and/or spatio-temporal sequestration of the reactions^{43,44}. TNMT orthologues as shown in FIGS. 14G and 15G are tested.

### Example 15

### Generating Quaternary Benzylisoquinoline Alkaloids

[0208] While N-methylscoulerine and N-methylcheilanthifoline are undesirable side-products, they may themselves be end products of interest. Both compounds are quaternary benzylisoquinoline alkaloids like sanguinarine and berberine. N-methylscoulerine (cyclanoline) can be extracted from several plants of the genus Stephania and has been described as an acetylcholinesterase inhibitor⁴⁵, but to the best of the applicants' knowledge N-methylcheilanthifoline has never been detected in plants. The promiscuity of TNMT could also be further explored to generate other quaternary benzylisoquinoline alkaloids. Synthesis of N-methylcheilanthifoline, although serendipitous, highlights the potential of combinatorial biology in S. cerevisiae, through which libraries of alkaloids can be generated independent of their abundance in nature.

### Example 16

### Bypassing the Need to Feed Norlaudanosoline

[0209] Synthesis of (S)-reticuline from glucose and glycerol has been reported in E. coli^{18,19} but not in S. cerevisiae. Thus, supplemented (R,S)-norlaudanosoline was provided to measure the efficiency of the reconstituted BIA pathway. The applicants observed that just 10% of fed norlaudanosoline was detected in the cell extract after 16 hours of incubation with the negative control yeast cells (FIG. 6A). While the applicants cannot directly compare substrates with different chemical properties and possibly different mechanisms of transport into yeast, they suspect that limited availability of norlaudanosoline to the intracellular enzymes is limiting pathway efficiency. In a previous study, it was shown that reticuline accumulation increased with (R,S)-norlaudanosoline concentration in cell feeding assays²², further supporting the evidence that low intracellular norlaudanosoline concentration is limiting flux. Linking the reconstituted alkaloid pathway to the microbe's central metabolism, thereby bypassing the need to feed norlaudanosoline, will likely boost yields of reticuline and thus the entire dihydrosanguinarine pathway. To bypass the need to feed norlaudanosoline, norcoclaurine (FIG. 1) or norlaudanosoline may be produced in yeast from the precursor tyrosine. Yeast is engineered for an increased tyrosine production and the enzymes for the synthesis of norcoclaurine (or norlaudanosoline) from tyrosine is heterologously expressed (FIG. 1).

### Example 17

### Role of CYP719 and TNMT in the Noscapine Pathway

[0210] Other activities of CYP719s on protoberberines have previously been published, such as the Ring A closure of scoulerine-derived tetrahydrocolumbamine (THC) to produce canadine. In particular, CYP719s catalyzing the Ring A closure of THC to produce canadine have been described in P. somniferum, C. japonica, A. mexicana, and E. californica⁶⁸. Scoulerine is methylated by scoulerine-O-methyltransferase (SOMT) to generate tetrahydrocolumbamine. CYP719A13 from Argemone mexicana was shown to catalyze the Ring A closure of both cheilanthifoline and tetrahydrocolumbamine²⁸ strongly indicating that the CYP719 library in FIG. 10C also includes tetrahydrocolumbamine Ring A closers. Canadine can be methylated by TNMT to generate N-methylcanadine, a precursor to the cough suppressant and potential anticancer drug noscapine¹⁷. However, TNMT can also N-methylate scoulerine and tetrahydrocolumbamine, generating the undesired side products N-methyl-scoulerine and N-methyltetrahydrocolumbamine (FIG. 20A). For example, when P. somniferum SOMT, CYP719A21 (canadine synthase, CAS; and ref. 68) and TNMT are co-expressed in S. cerevisiae supplemented with scoulerine, the major products accumulating are tetrahydrocolumbamine and N-methyltetrahydrocolumbamine, with only trace accumulation of N-methylcanadine and trace residual scoulerine (FIG. 20B). N-methylscoulerine and canadine were not detected, indicating that PsSOMT converts scoulerine to THC before TNMT can N-methylated it, but then TNMT N-methylates most of THC to the side product N-methyl-THC before PsCAS can convert it to canadine. The presence of both a Ring A-closing CYP719 and TNMT in this pathway will therefore require CYP719 optimization, using candidates from the CYP719 library, for efficient production of N-methylcanadine and ultimately noscapine in a microbial host. The present invention encompasses improving yield of N-methylcanadine comprising using of a THC Ring A closer with a higher affinity to THC than that of TNMT to THC, the Ring A closer having been identified in a method analogous to that used to identify scoulerine Ring a/Ring B closers.

[0211] The scope of the claims should not be limited by the preferred embodiments set forth in the examples, but should be given the broadest interpretation consistent with the description as a whole.

### REFERENCES

[0212] 1 De Luca, V., Salim, V., Atsumi, S. M. & Yu, F. Mining the biodiversity of plants: a revolution in the making. Science 336, 1658-1661 (2012).
[0213] Newman, D. J. & Cragg, G. M. Natural products as sources of new drugs over the last 25 years. J. Nat. Prod. 70, 461-477 (2007).
[0214] Mishra, B. B. & Tiwari, V. K. Natural products: an evolving role in future drug discovery. Eur. J. Med. Chem. 46, 4769-4807 (2011).
[0215] Li, J. W. & Vederas, J. C. Drug discovery and natural products: end of an era or an endless frontier? Science 325, 161-165 (2009).
[0216] Giddings, L. A. & Newman, D. J. Microbial natural products: molecular blueprints for antitumor drugs. J. Ind. Microbiol. Biotechnol. doi: 10.1007/s10295-013-1331-1 (2013).
[0217] Xiao, M. et al. Transcriptome analysis based on next-generation sequencing of non-model plants producing specialized metabolites of biotechnological interest. J. Biotechnol. 166, 122-134 (2013).
[0218] Liu, L., Redden, H. & Alper, H. S. Frontiers of yeast metabolic engineering: diversifying beyond ethanol and Saccharomyces. Curr. Opin. Biotechnol. (2013).
[0219] Gibson, D. G. Synthesis of DNA fragments in yeast by one-step assembly of overlapping oligonucleotides. Nucleic Acids Res. 37, 6984-6990 (2009).
[0220] Shao, Z. & Zhao, H. DNA assembler, an in vivo genetic method for rapid construction of biochemical pathways. Nucleic Acids Res. 37, e16, doi: 10.1093/nar/gkn991 (2009).
[0221] 10 Paddon, C. J. et al. High-level semi-synthetic production of the potent antimalarial artemisinin. Nature 496, 528-532 (2013).
[0222] 11 Chougule, M., Patel, A. R., Sachdeva, P., Jackson, T. & Singh, M. Anticancer activity of noscapine, an opioid alkaloid in combination with cisplatin in human non-small cell lung cancer. Lung Cancer 71, 271-282 (2011).
[0223] 12 Bessi, I. et al. Spectroscopic, molecular modeling, and NMR-spectroscopic investigation of the binding mode of the natural alkaloids berberine and sanguinarine to human telomeric G-quadruplex DNA. ACS Chem. Biol. 7, 1109-1119 (2012).
[0224] 13 Rice, K. C. Synthetic opium-alkaloids and derivatives—a short total synthesis of (+/−)-dihydrothebainone, (+/−)-dihydrocodeinone, and (+/−)-nordihydrocodeinone as an approach to a practical synthesis of morphine, codeine, and congeners. J. Org. Chem. 45, 3135-3137 (1980).
[0225] 14 Pickens, L. B., Tang, Y. & Chooi, Y. H. Metabolic engineering for the production of natural products. Annu. Rev. Chem. Biomol. Eng. 2, 211-236 (2011).
[0226] 15 Newhouse, T., Baran, P. S. & Hoffmann, R. W. The economies of synthesis. Chem. Soc. Rev. 38, 3010-3021 (2009).
[0227] 16 Sato, F., Inui, T. & Takemura, T. Metabolic engineering in isoquinoline alkaloid biosynthesis. Curr. Pharm. Biotechnol. 8, 211-218 (2007).
[0228] 17 Hagel, J. M. & Facchini, P. J. Benzylisoquinoline alkaloid metabolism: a century of discovery and a brave new world. Plant Cell Physiol 54(5), 647-672 (2013).
[0229] 18 Nakagawa, A. et al. A bacterial platform for fermentative production of plant alkaloids. Nat. Commun. 2, doi: 10.1038/Ncomms1327 (2011).
[0230] 19 Nakagawa, A. et al. Bench-top fermentative production of plant benzylisoquinoline alkaloids using a bacterial platform. Bioeng. Bugs 3, 49-53 (2012).
[0231] 20 Minami, H. et al. Microbial production of plant benzylisoquinoline alkaloids. Proc. Natl. Acad. Sci. U.S.A. 105, 7393-7398 (2008).
[0232] 21 Siddiqui, M. S., Thodey, K., Trenchard, I. & Smolke, C. D. Advancing secondary metabolite biosynthesis in yeast with synthetic biology tools. FEMS Yeast Res. 12, 144-170 (2012).
[0233] 22 Hawkins, K. M. & Smolke, C. D. Production of benzylisoquinoline alkaloids in Saccharomyces cerevisiae. Nat. Chem. Biol. 4, 564-573 (2008).
[0234] 23 Godowski, K. C. Antimicrobial action of sanguinarine. J. Clin. Dent. 1, 96-101 (1989).
[0235] 24 Obiang-Obounou, B. W. et al. The mechanism of action of sanguinarine against methicillin-resistant Staphylococcus aureus. J. Toxicol. Sci. 36, 277-283 (2011).
[0236] 25 Beaudoin, G. A. & Facchini, P. J. Isolation and characterization of a cDNA encoding (S)-cis-N-methylstylopine 14-hydroxylase from opium poppy, a key enzyme in sanguinarine biosynthesis. Biochem. Biophys. Res. Commun. 431, 597-603 (2013).
[0237] 26 Hagel, J. M. et al. Characterization of a flavoprotein oxidase from opium poppy catalyzing the final steps in sanguinarine and papaverine biosynthesis. J. Biol. Chem. 287, 42972-42983 (2012).
[0238] 27 Takemura, T., Ikezawa, N., Iwasa, K. & Sato, F. Molecular cloning and characterization of a cytochrome P450 in sanguinarine biosynthesis from Eschscholzia californica cells. Phytochemistry 91, 100-108 (2013).
[0239] 28 Diaz Chavez, M. L., Rolf, M., Gesell, A. & Kutchan, T. M. Characterization of two methylenedioxy bridge-forming cytochrome P450-dependent enzymes of alkaloid formation in the Mexican prickly poppy Argemone mexicana. Arch. Biochem. Biophys. 507, 186-193 (2011).
[0240] 29 Facchini, P. J. & De Luca, V. Phloem-specific expression of tyrosine/dopa decarboxylase genes and the biosynthesis of isoquinoline alkaloids in opium poppy. Plant Cell 7, 1811-1821 (1995).
[0241] 30 Stipanovic, R. D., Howell, C. R. & Bell, A. A. Sanguinarine: a simplified method of isolation. J. Heterocyclic Chem. 9, 1453-1454 (1972).
[0242] 31 Ounaroon, A., Decker, G., Schmidt, J., Lottspeich, F. & Kutchan, T. M. (R,S)-Reticuline 7-O-methyltransferase and (R,S)-norcoclaurine 6-O-methyltransferase of Papaver somniferum—cDNA cloning and characterization of methyl transfer enzymes of alkaloid biosynthesis in opium poppy. Plant J 36, 808-819 (2003).
[0243] 32 Ziegler, J., Diaz-Chavez, M. L., Kramell, R., Ammer, C. & Kutchan, T. M. Comparative macroarray analysis of morphine containing Papaver somniferum and eight morphine free Papaver species identifies an O-methyltransferase involved in benzylisoquinoline biosynthesis. Planta 222, 458-471 (2005).
[0244] 33 Dittrich, H. & Kutchan, T. M. Molecular cloning, expression, and induction of berberine bridge enzyme, an enzyme essential to the formation of benzophenanthridine alkaloids in the response of plants to pathogenic attack. Proc. Natl. Acad. Sci. U.S.A. 88, 9969-9973 (1991).
[0245] 34 Liscombe, D. K. & Facchini, P. J. Molecular cloning and characterization of tetrahydroprotoberberine cis-N-methyltransferase, an enzyme involved in alkaloid biosynthesis in opium poppy. J. Biol. Chem. 282, 14741-14751 (2007).
[0246] 35 Flagfeldt, D. B., Siewers, V., Huang, L. & Nielsen, J. Characterization of chromosomal integration sites for heterologous gene expression in Saccharomyces cerevisiae. Yeast 26, 545-551 (2009).
[0247] 36 Farrow, S. C., Hagel, J. M. & Facchini, P. J. Transcript and metabolite profiling in cell cultures of 18 plant species that produce benzylisoquinoline alkaloids. Phytochemistry 77, 79-88 (2012).
[0248] 37 Facchini, P. J., Penzes, C., Johnson, A. G. & Bull, D. Molecular characterization of berberine bridge enzyme genes from opium poppy. Plant Physiol. 112, 1669-1677 (1996).
[0249] 38 Pompon, D., Louerat, B., Bronine, A. & Urban, P. Yeast expression of animal and plant P450s in optimized redox environments. Methods Enzymol. 272, 51-64 (1996).
[0250] 39 Ikezawa, N., Iwasa, K. & Sato, F. Molecular cloning and characterization of methylenedioxy bridge-forming enzymes involved in stylopine biosynthesis in Eschscholzia californica. FEBS J. 274, 1019-1035 (2007).
[0251] 40 Schenkman, J. B. & Jansson, I. The many roles of cytochrome b5. Pharmacol. Ther. 97, 139-152 (2003).
[0252] 41 Weng, J. K., Philippe, R. N. & Noel, J. P. The rise of chemodiversity in plants. Science 336, 1667-1670 (2012).
[0253] 42 Yoshikuni, Y., Ferrin, T. E. & Keasling, J. D. Designed divergent evolution of enzyme function. Nature 440, 1078-1082 (2006).
[0254] 43 Avalos, J. L., Fink, G. R. & Stephanopoulos, G. Compartmentalization of metabolic pathways in yeast mitochondria improves the production of branched-chain alcohols. Nat. Biotechnol. 31, 335-341 (2013).
[0255] 44 Farhi, M. et al. Harnessing yeast subcellular compartments for the production of plant terpenoids. Metab. Eng. 13, 474-481 (2011).
[0256] 45 Ingkaninan, K., Phengpa, P., Yuenyongsawad, S. & Khorana, N. Acetylcholinesterase inhibitors from Stephania venosa tuber. J. Pharm. Pharmacol. 58, 695-700 (2006).
[0257] 46 Facchini, P. J. et al. Synthetic biosystems for the production of high-value plant metabolites. Trends Biotechnol. 30, 127-131 (2012).
[0258] 47 Engels, B., Dahm, P. & Jennewein, S. Metabolic engineering of taxadiene biosynthesis in yeast as a first step towards Taxol (Paclitaxel) production. Metab. Eng. 10, 201-206 (2008).
[0259] 48 Mikkelsen, M. D. et al. Microbial production of indolylglucosinolate through engineering of a multi-gene pathway in a versatile yeast expression platform. Metab. Eng. 14, 104-111 (2012).
[0260] 49 Szczebara, F. M. et al. Total biosynthesis of hydrocortisone from a simple carbon source in yeast. Nat. Biotechnol. 21, 143-149 (2003).
[0261] 50 Schumacher, H. M. & Zenk, M. H. Partial-purification and characterization of dihydrobenzophenanthridine oxidase from Escholtzia californica cell-suspension cultures. Plant Cell Reports 7, 43-46 (1988).
[0262] 51 Nguyen, D. T. et al. Biochemical conservation and evolution of germacrene A oxidase in asteraceae. J. Biol. Chem. 285, 16588-16598 (2010).
[0263] 52 Barriuso, J. et al. Double oxidation of the cyclic nonaketide dihydromonacolin L to monacolin J by a single cytochrome P450 monooxygenase, LovA. J. Am. Chem. Soc. 133, 8078-8081 (2011).
[0264] 53 Gietz, R. D. & Schiestl, R. H. High-efficiency yeast transformation using the LiAc/SS carrier DNA/PEG method. Nat. Protoc. 2, 31-34 (2007).
[0265] 54 Bird, D. A. & Facchini, P. J. Berberine bridge enzyme, a key branch-point enzyme in benzylisoquinoline alkaloid biosynthesis, contains a vacuolar sorting determinant. Planta 213, 888-897 (2001).
[0266] 55 Jansen, G., Wu, C., Schade, B., Thomas, D. Y. & Whiteway, M. Drag & Drop cloning in yeast. Gene 344, 43-51 (2005).
[0267] 56 Clasquin, M. F., Melamud, E. & Rabinowitz, J. D. LC-MS data processing with MAVEN: a metabolomic analysis and visualization engine. Curr. Protoc. Bioinformatics. Chapter 14, Unit14.11, doi:10.1002/0471250953.bi1411s37 (2012).
[0268] 57 Sikorski, R. S. & Hieter, P. A system of shuttle vectors and yeast host strains designed for efficient manipulation of DNA in Saccharomyces cerevisiae. Genetics 122, 19-27 (1989).
[0269] 58 Ro, D. K. et al. Induction of multiple pleiotropic drug resistance genes in yeast engineered to produce an increased level of anti-malarial drug precursor, artemisinic acid. BMC Biotechnol. 8, 83, doi: 10.1186/1472-6750-8-83 (2008).
[0270] 59 van Dijken, J. P. et al. An interlaboratory comparison of physiological and genetic properties of four Saccharomyces cerevisiae strains. Enzyme Microb. Technol. 26, 706-714 (2000).
[0271] 60 Hirata K, Poeaknapo C, Schmidt J, Zenk M H (2004) 1,2-Dehydroreticuline synthase, the branch point enzyme opening the morphinan biosynthetic pathway. Phytochemistry 65: 1039-1046. 11, 12.
[0272] 61 De-Eknamkul W, Zenk M H (1992) Purification and properties of 1,2-dehydroreticuline reductase from Papaver somniferum seedlings. Phytochemistry 31: 813-821.
[0273] 62 Kraus P F, Kutchan T M (1995) Molecular cloning and heterologous expression of a cDNA encoding berbamunine synthase, a C—O phenol-coupling cytochrome P450 from the higher plant Berberis stolonifera. Proc Natl Acad Sci USA 92: 2071-2075.
[0274] 63 Min, X. J., Butler, G., Storms, R. & Tsang, A. OrfPredictor: predicting protein-coding regions in EST-derived sequences. Nucleic Acids Res. 33, W677-80 (2005).
[0275] 64 Nelson, D. R. Cytochrome P450 nomenclature, 2004. Methods Mol. Bio. 320, 1-10 (2006).
[0276] 65 Tamura, K., Stecher G., Peterson D., Filipski, A. & Kumar, S. MEGA6: Molecular Evolutionary Genetics Analysis version 6.0. Mol. Biol. Evol. 30, 2725-2729 (2013).
[0277] 66 Ikezawa, N., Iwasa, K., & Sato, F. CYP719A subfamily of cytochrome P450 oxygenases and isoquinoline alkaloid biosynthesis in Eschscholzia californica. Plant Cell Rep. 28, 123-133 (2009).
[0278] 67 Marques, J. V. et al. Next generation sequencing in predicting gene function in podophyllotoxin biosynthesis. J. Biol. Chem. 288, 466-479 (2013).
[0279] 68 Dang, T. T. & Facchini, P. J. Cloning and characterization of canadine synthase involved in noscapine biosynthesis in opium poppy. FEBS Lett. 588, 198-204 (2014).
[0280] 69 Gesell, A. et al. CYP719B1 is salutaridine synthase, the C—C phenol-coupling enzyme of morphine biosynthesis in opium poppy. J. Biol. Chem. 284, 24432-24442 (2009).
[0281] 70 Dang, T.-T. T., & Facchini, P. J. (2012). Characterization of three O-methyltransferases involved in noscapine biosynthesis in opium poppy. Plant Physiology, 159(2), 618-31. doi:10.1104/pp. 112.194886.
[0282] 71 Kim, J. S. et al. Improvement of reticuline productivity from dopamine by using engineered Escherichia coli. Biosci. Biotechnol. Biochem. 77, 2166-2168 (2013).
[0283] 72 Takeshita, N. et al. Molecular cloning and characterization of S-adenosyl-L-methionine:scoulerine-9-O-methyltransferase from cultured cells of Coptis japonica. Plant Cell Physiol. 36, 29-36 (1995).
[0284] 73 Ikezawa, N. et al. Molecular cloning and characterization of CYP719, a methylenedioxy bridge-forming enzyme that belongs to a novel P450 family, from cultured Coptis japonica cells. J. Biol. Chem. 278, 38557-38565 (2003).
[0285] 74 Fossati E., et al. Reconstitution of a 10-gene pathway for synthesis of the plant alkaloid dihydrosanguinarine in Saccharomyces cerevisiae. Nature Communications, 5 (3283), (2014)

The application's sequence listing, which the Patent Office published only in electronic form, follows.

SEQUENCE LISTING (573 sequences)

SEQ ID NO: 1 - DNA, 8414 bp, Artificial Sequence
  Synthetic sequence
aaaagctggagctcgtttaaacggcgcgcctagtacggattagaagccgccgagcgggtgacagccctccgaaggaagactctcctccgtgcgtcctcgtcttcaccggtcgcgttcctgaaacgcagatgtgcctcgcgccgcactgctccgaacaataaagattctacaatactagcttttatggttatgaagaggaaaaattggcagtaacctggccccacaaaccttcaaatgaacgaatcaaattaacaaccataggatgataatgcgattagttttttagccttatttctggggtaattaatcagcgaagcgatgatttttgatctattaacagatatataaatgcaaaaactgcataaccactttaactaatactttcaacattttcggtttgtattacttcttattcaaatgtaataaaagtatcaacaaaaaattgttaatatacctctatactttaacgtcaaggagaaaaaaccccggattctagagcggccgcactagtggatcccccgggctgcaggaattcgatatcaagcttatcgataccgtcgacgtcatatggatccgctgcacggtcctgttccctagcatgtacgtgagcgtatttccttttaaaccacgacgctttgtcttcattcaacgtttcccattgtttttttctactattgctttgctgtgggaaaaacttatcgaaagatgacgactttttcttaattctcgttttaagagcttggtgagcgctaggagtcactgccaggtatcgtttgaacacggcattagtcagggaagtcataacacagtcctttcccgcaattttctttttctattactcttggcctcctctagtacactctatatttttttatgcctcggtaatgattttcatttttttttttccacctagcggatgactctttttttttcttagcgattggcattatcacataatgaattatacattatataaagtaatgtgatttcttcgaagaatatactaaaaaatgagcaggcaagataaacgaaggcaaagatgacagagcagaaagccctagtaaagcgtattacaaatgaaaccaagattcagattgcgatctctttaaagggtggtcccctagcgatagagcactcgatcttcccagaaaaagaggcagaagcagtagcagaacaggccacacaatcgcaagtgattaacgtccacacaggtatagggtttctggaccatatgatacatgctctggccaagcattccggctggtcgctaatcgttgagtgcattggtgacttacacatagacgaccatcacaccactgaagactgcgggattgctctcggtcaagcttttaaagaggccctactggcgcgtggagtaaaaaggtttggatcaggatttgcgcctttggatgaggcactttccagagcggtggtagatctttcgaacaggccgtacgcagttgtcgaacttggtttgcaaagggagaaagtaggagatctctcttgcgagatgatcccgcattttcttgaaagctttgcagaggctagcagaattaccctccacgttgattgtctgcgaggcaagaatgatcatcaccgtagtgagagtgcgttcaaggctcttgcggttgccataagagaagccacctcgcccaatggtaccaacgatgttccctccaccaaaggtgttcttatgtagtgacaccgattatttaaagctgcaggtcgacctcgagtcatgtaattagttatgtcacgcttacattcacgccctccccccacatccgctctaaccgaaaaggaaggagttagacaacctgaagtctaggtccctatttatttttttatagttatgttagtattaagaacgttatttatatttcaaatttttcttttttttctgtacagacgcgtgtacgcatgtaacattatactgaaaaccttgcttgagaaggttttgggacgctcgaaggctttaatttgcggccggtacctaataacttcgtatagcatacattatacgaagttatattaagggttctcgacgttttcgacactggatggcggcgttagtatcgaatcgacagcagtatagcgaccagcattcacatacgattgacgcatgatattactttctgcgcacttaacttcgcatctgggcagatgatgtcgaggcgaaaaaaaatataaatcacgctaacatttgattaaaatagaacaactacaatataaaaaaactatacaaatgacaagttcttgaaaacaagaatctttttattgtcagtactgattagaaaaactcatcgagcatcaaatgaaactgcaatttattcatatcaggattatcaataccatatttttgaaaaagccgtttctgtaatgaaggagaaaactcaccgaggcagttccataggatggcaagatcctggtatcggtctgcgattccgactcgtccaacatcaatacaacctattaatttcccctcgtcaaaaataaggttatcaagtgagaaatcaccatgagtgacgactgaatccggtgagaatggcaaaagcttatgcatttctttccagacttgttcaacaggccagccattacgctcgtcatcaaaatcactcgcatcaaccaaaccgttattcattcgtgattgcgcctgagcgagacgaaatacgcgatcgctgttaaaaggacaattacaaacaggaatcgaatgcaaccggcgcaggaacactgccagcgcatcaacaatattttcacctgaatcaggatattcttctaatacctggaatgctgttttgccggggatcgcagtggtgagtaaccatgcatcatcaggagtacggataaaatgcttgatggtcggaagaggcataaattccgtcagccagtttagtctgaccatctcatctgtaacatcattggcaacgctacctttgccatgtttcagaaacaactctggcgcatcgggcttcccatacaatcgatagattgtcgcacctgattgcccgacattatcgcgagcccatttatacccatataaatcagcatccatgttggaatttaatcgcggcctcgaaacgtgagtcttttccttacccatggttgtttatgttcggatgtgatgtgagaactgtatcctagcaagattttaaaaggaagtatatgaaagaagaacctcagtggcaaatcctaaccttttatatttctctacaggggcgcggcgtggggacaattcaacgcgtctgtgaggggagcgtttccctgctcgcaggtctgcagcgaggagccgtaatttttgcttcgcgccgtgcggccatcaaaatgtatggatgcaaatgattatacatggggatgtatgggctaaatgtacgggcgacagtcacatcatgcccctgagctgcgcacgtcaagactgtcaaggagggtattctgggcctccatgtcgctggccgggtgacccggcggggacgaggcaagctaaacagatctctagacctaataacttcgtatagcatacattatacgaagttatattaagggttgtcttaattaagggtacccaattcgccctatagtgagtcgtattacgcgcgctcactggccgtcgttttacaacgtcgtgactgggaaaaccctggcgttacccaacttaatcgccttgcagcacatccccctttcgccagctggcgtaatagcgaagaggcccgcaccgatcgcccttcccaacagttgcgcagcctgaatggcgaatggcgcgacgcgccctgtagcggcgcattaagcgcggcgggtgtggtggttacgcgcagcgtgaccgctacacttgccagcgccctagcgcccgctcctttcgctttcttcccttcctttctcgccacgttcgccggctttccccgtcaagctctaaatcgggggctccctttagggttccgatttagtgctttacggcacctcgaccccaaaaaacttgattagggtgatggttcacgtagtgggccatcgccctgatagacggtttttcgccctttgacgttggagtccacgttctttaatagtggactcttgttccaaactggaacaacactcaaccctatctcggtctattcttttgatttataagggattttgccgatttcggcctattggttaaaaaatgagctgatttaacaaaaatttaacgcgaattttaacaaaatattaacgtttacaatttcctgatgcggtattttctccttacgcatctgtgcggtatttcacaccgcatagatccgtcgagttcaagagaaaaaaaaagaaaaagcaaaaagaaaaaaggaaagcgcgcctcgttcagaatgacacgtatagaatgatgcattaccttgtcatcttcagtatcatactgttcgtatacatacttactgacattcataggtatacatatatacacatgtatatatatcgtatgctgcagctttaaataatcggtgtcactacataagaacacctttggtggagggaacatcgttggtaccattgggcgaggtggcttctcttatggcaaccgcaagagccttgaacgcactctcactacggtgatgatcattcttgcctcgcagacaatcaacgtggagggtaattctgctagcctctgcaaagctttcaagaaaatgcgggatcatctcgcaagagagatctcctactttctccctttgcaaaccaagttcgacaactgcgtacggcctgttcgaaagatctaccaccgctctggaaagtgcctcatccaaaggcgcaaatcctgatccaaacctttttactccacgcgccagtagggcctctttaaaagcttgaccgagagcaatcccgcagtcttcagtggtgtgatggtcgtctatgtgtaagtcaccaatgcactcaacgattagcgaccagccggaatgcttggccagagcatgtatcatatggtccagaaaccctatacctgtgtggacgttaatcacttgcgattgtgtggcctgttctgctactgcttctgcctctttttctgggaagatcgagtgctctatcgctaggggaccaccctttaaagagatcgcaatctgaatcttggtttcatttgtaatacgctttactagggctttctgctctgtcatctttgccttcgtttatcttgcctgctcattttttagtatattcttcgaagaaatcacattactttatataatgtataattcattatgtgataatgccaatcgctaagaaaaaaaaagagtcatccgctaggggaaaaaaaaaaatgaaaatcattaccgaggcataaaaaaatatagagtgtactagaggaggccaagagtaatagaaaaagaaaattgcgggaaaggactgtgttatgacttccctgactaatgccgtgttcaaacgatacctggcagtgactcctagcgctcaccaagctcttaaaacgggaatttatggtgcactctcagtacaatctgctctgatgccgcatagttaagccagccccgacacccgccaacacgcgctgacgcgccctgacgggcttgtctgctcccggcatccgcttacagacaagctgtgaccgtctccgggagctgcatgtgtcagaggttttcaccgtcatcaccgaaacgcgcgagacgaaagggcctcgtgatacgcctatttttataggttaatgtcatgataataatggtttcttaggacggatcgcttgcctgtaacttacacgcgcctcgtatcttttaatgatggaataatttgggaatttactctgtgtttatttatttttatgttttgtatttggattttagaaagtaaataaagaaggtagaagagttacggaatgaagaaaaaaaaataaacaaaggtttaaaaaatttcaacaaaaagcgtactttacatatatatttattagacaagaaaagcagattaaatagatatacattcgattaacgataagtaaaatgtaaaatcacaggattttcgtgtgtggtcttctacacagacaagatgaaacaattcggcattaatacctgagagcaggaagagcaagataaaaggtagtatttgttggcgatccccctagagtcttttacatcttcggaaaacaaaaactattttttctttaatttctttttttactttctatttttaatttatatatttatattaaaaaatttaaattataattatttttatagcacgtgatgaaaaggacccaggtggcacttttcggggaaatgtgcgcggaacccctatttgtttatttttctaaatacattcaaatatgtatccgctcatgagacaataaccctgataaatgcttcaataatattgaaaaaggaagagtatgagtattcaacatttccgtgtcgcccttattcccttttttgcggcattttgccttcctgtttttgctcacccagaaacgctggtgaaagtaaaagatgctgaagatcagttgggtgcacgagtgggttacatcgaactggatctcaacagcggtaagatccttgagagttttcgccccgaagaacgttttccaatgatgagcacttttaaagttctgctatgtggcgcggtattatcccgtattgacgccgggcaagagcaactcggtcgccgcatacactattctcagaatgacttggttgagtactcaccagtcacagaaaagcatcttacggatggcatgacagtaagagaattatgcagtgctgccataaccatgagtgataacactgcggccaacttacttctgacaacgatcggaggaccgaaggagctaaccgcttttttgcacaacatgggggatcatgtaactcgccttgatcgttgggaaccggagctgaatgaagccataccaaacgacgagcgtgacaccacgatgcctgtagcaatggcaacaacgttgcgcaaactattaactggcgaactacttactctagcttcccggcaacaattaatagactggatggaggcggataaagttgcaggaccacttctgcgctcggcccttccggctggctggtttattgctgataaatctggagccggtgagcgtgggtctcgcggtatcattgcagcactggggccagatggtaagccctcccgtatcgtagttatctacacgacggggagtcaggcaactatggatgaacgaaatagacagatcgctgagataggtgcctcactgattaagcattggtaactgtcagaccaagtttactcatatatactttagattgatttaaaacttcatttttaatttaaaaggatctaggtgaagatcctttttgataatctcatgaccaaaatcccttaacgtgagttttcgttccactgagcgtcagaccccgtagaaaagatcaaaggatcttcttgagatcctttttttctgcgcgtaatctgctgcttgcaaacaaaaaaaccaccgctaccagcggtggtttgtttgccggatcaagagctaccaactctttttccgaaggtaactggcttcagcagagcgcagataccaaatactgtccttctagtgtagccgtagttaggccaccacttcaagaactctgtagcaccgcctacatacctcgctctgctaatcctgttaccagtggctgctgccagtggcgataagtcgtgtcttaccgggttggactcaagacgatagttaccggataaggcgcagcggtcgggctgaacggggggttcgtgcacacagcccagcttggagcgaacgacctacaccgaactgagatacctacagcgtgagctatgagaaagcgccacgcttcccgaagggagaaaggcggacaggtatccggtaagcggcagggtcggaacaggagagcgcacgagggagcttccagggggaaacgcctggtatctttatagtcctgtcgggtttcgccacctctgacttgagcgtcgatttttgtgatgctcgtcaggggggcggagcctatggaaaaacgccagcaacgcggcctttttacggttcctggccttttgctggccttttgctcacatgttctttcctgcgttatcccctgattctgtggataaccgtattaccgcctttgagtgagctgataccgctcgccgcagccgaacgaccgagcgcagcgagtcagtgagcgaggaagcggaagagcgcccaatacgcaaaccgcctctccccgcgcgttggccgattcattaatgcagctggcacgacaggtttcccgactggaaagcgggcagtgagcgcaacgcaattaatgtgagttacctcactcattaggcaccccaggctttacactttatgcttccggctcctatgttgtgtggaattgtgagcggataacaatttcacacaggaaacagctatgaccatgattacgccaagcgcgcaattaaccctcactaaagggaac

SEQ ID NO: 2 - DNA, 8232 bp, Artificial Sequence
  Synthetic sequence
aaaagctggagctcgtttaaacggcgcgcctagtacggattagaagccgccgagcgggtgacagccctccgaaggaagactctcctccgtgcgtcctcgtcttcaccggtcgcgttcctgaaacgcagatgtgcctcgcgccgcactgctccgaacaataaagattctacaatactagcttttatggttatgaagaggaaaaattggcagtaacctggccccacaaaccttcaaatgaacgaatcaaattaacaaccataggatgataatgcgattagttttttagccttatttctggggtaattaatcagcgaagcgatgatttttgatctattaacagatatataaatgcaaaaactgcataaccactttaactaatactttcaacattttcggtttgtattacttcttattcaaatgtaataaaagtatcaacaaaaaattgttaatatacctctatactttaacgtcaaggagaaaaaaccccggattctagagcggccgcactagtggatcccccgggctgcaggaattcgatatcaagcttatcgataccgtcgacgtcatatggatccgctgcacggtcctgttccctagcatgtacgtgagcgtatttccttttaaaccacgacgctttgtcttcattcaacgtttcccattgtttttttctactattgctttgctgtgggaaaaacttatcgaaagatgacgactttttcttaattctcgttttaagagcttggtgagcgctaggagtcactgccaggtatcgtttgaacacggcattagtcagggaagtcataacacagtcctttcccgcaattttctttttctattactcttggcctcctctagtacactctatatttttttatgcctcggtaatgattttcatttttttttttccacctagcggatgactctttttttttcttagcgattggcattatcacataatgaattatacattatataaagtaatgtgatttcttcgaagaatatactaaaaaatgagcaggcaagataaacgaaggcaaagatgacagagcagaaagccctagtaaagcgtattacaaatgaaaccaagattcagattgcgatctctttaaagggtggtcccctagcgatagagcactcgatcttcccagaaaaagaggcagaagcagtagcagaacaggccacacaatcgcaagtgattaacgtccacacaggtatagggtttctggaccatatgatacatgctctggccaagcattccggctggtcgctaatcgttgagtgcattggtgacttacacatagacgaccatcacaccactgaagactgcgggattgctctcggtcaagcttttaaagaggccctactggcgcgtggagtaaaaaggtttggatcaggatttgcgcctttggatgaggcactttccagagcggtggtagatctttcgaacaggccgtacgcagttgtcgaacttggtttgcaaagggagaaagtaggagatctctcttgcgagatgatcccgcattttcttgaaagctttgcagaggctagcagaattaccctccacgttgattgtctgcgaggcaagaatgatcatcaccgtagtgagagtgcgttcaaggctcttgcggttgccataagagaagccacctcgcccaatggtaccaacgatgttccctccaccaaaggtgttcttatgtagtgacaccgattatttaaagctgcaggtcgacctcgagtcatgtaattagttatgtcacgcttacattcacgccctccccccacatccgctctaaccgaaaaggaaggagttagacaacctgaagtctaggtccctatttatttttttatagttatgttagtattaagaacgttatttatatttcaaatttttcttttttttctgtacagacgcgtgtacgcatgtaacattatactgaaaaccttgcttgagaaggttttgggacgctcgaaggctttaatttgcggccggtacctaataacttcgtatagcatacattatacgaagttatattaagggttctcgacgttttcgacactggatggcggcgttagtatcgaatcgacagcagtatagcgaccagcattcacatacgattgacgcatgatattactttctgcgcacttaacttcgcatctgggcagatgatgtcgaggcgaaaaaaaatataaatcacgctaacatttgattaaaatagaacaactacaatataaaaaaactatacaaatgacaagttcttgaaaacaagaatctttttattgtcagtactgattagaaaaactcatcgagcatcaaatgaaactgcaatttattcatatcaggattatcaataccatatttttgaaaaagccgtttctgtaatgaaggagaaaactcaccgaggcagttccataggatggcaagatcctggtatcggtctgcgattccgactcgtccaacatcaatacaacctattaatttcccctcgtcaaaaataaggttatcaagtgagaaatcaccatgagtgacgactgaatccggtgagaatggcaaaagcttatgcatttctttccagacttgttcaacaggccagccattacgctcgtcatcaaaatcactcgcatcaaccaaaccgttattcattcgtgattgcgcctgagcgagacgaaatacgcgatcgctgttaaaaggacaattacaaacaggaatcgaatgcaaccggcgcaggaacactgccagcgcatcaacaatattttcacctgaatcaggatattcttctaatacctggaatgctgttttgccggggatcgcagtggtgagtaaccatgcatcatcaggagtacggataaaatgcttgatggtcggaagaggcataaattccgtcagccagtttagtctgaccatctcatctgtaacatcattggcaacgctacctttgccatgtttcagaaacaactctggcgcatcgggcttcccatacaatcgatagattgtcgcacctgattgcccgacattatcgcgagcccatttatacccatataaatcagcatccatgttggaatttaatcgcggcctcgaaacgtgagtcttttccttacccatggttgtttatgttcggatgtgatgtgagaactgtatcctagcaagattttaaaaggaagtatatgaaagaagaacctcagtggcaaatcctaaccttttatatttctctacaggggcgcggcgtggggacaattcaacgcgtctgtgaggggagcgtttccctgctcgcaggtctgcagcgaggagccgtaatttttgcttcgcgccgtgcggccatcaaaatgtatggatgcaaatgattatacatggggatgtatgggctaaatgtacgggcgacagtcacatcatgcccctgagctgcgcacgtcaagactgtcaaggagggtattctgggcctccatgtcgctggccgggtgacccggcggggacgaggcaagctaaacagatctctagacctaataacttcgtatagcatacattatacgaagttatattaagggttgtcttaattaagggtacccaattcgccctatagtgagtcgtattacgcgcgctcactggccgtcgttttacaacgtcgtgactgggaaaaccctggcgttacccaacttaatcgccttgcagcacatccccctttcgccagctggcgtaatagcgaagaggcccgcaccgatcgcccttcccaacagttgcgcagcctgaatggcgaatggcgcgacgcgccctgtagcggcgcattaagcgcggcgggtgtggtggttacgcgcagcgtgaccgctacacttgccagcgccctagcgcccgctcctttcgctttcttcccttcctttctcgccacgttcgccggctttccccgtcaagctctaaatcgggggctccctttagggttccgatttagtgctttacggcacctcgaccccaaaaaacttgattagggtgatggttcacgtagtgggccatcgccctgatagacggtttttcgccctttgacgttggagtccacgttctttaatagtggactcttgttccaaactggaacaacactcaaccctatctcggtctattcttttgatttataagggattttgccgatttcggcctattggttaaaaaatgagctgatttaacaaaaatttaacgcgaattttaacaaaatattaacgtttacaatttcctgatgcggtattttctccttacgcatctgtgcggtatttcacaccgcataggcaagtgcacaaacaatacttaaataaatactactcagtaataacctatttcttagcatttttgacgaaatttgctattttgttagagtcttttacaccatttgtctccacacctccgcttacatcaacaccaataacgccatttaatctaagcgcatcaccaacattttctggcgtcagtccaccagctaacataaaatgtaagctttcggggctctcttgccttccaacccagtcagaaatcgagttccaatccaaaagttcacctgtcccacctgcttctgaatcaaacaagggaataaacgaatgaggtttctgtgaagctgcactgagtagtatgttgcagtcttttggaaatacgagtcttttaataactggcaaaccgaggaactcttggtattcttgccacgactcatctccatgcagttggacgatatcaatgccgtaatcattgaccagagccaaaacatcctccttaggttgattacgaaacacgccaaccaagtatttcggagtgcctgaactatttttatatgcttttacaagacttgaaattttccttgcaataaccgggtcaattgttctctttctattgggcacacatataatacccagcaagtcagcatcggaatctagagcacattctgcggcctctgtgctctgcaagccgcaaactttcaccaatggaccagaactacctgtgaaattaataacagacatactccaagctgcctttgtgtgcttaatcacgtatactcacgtgctcaatagtcaccaatgccctccctcttggccctctccttttcttttttcgaccgaattaattcttaatcggcaaaaaaagaaaagctccggatcaagattgtacgtaaggtgacaagctatttttcaataaagaatatcttccactactgccatctggcgtcataactgcaaagtacacatatattacgatgctgtctattaaatgcttcctatattatatatatagtaatgtcgtttatggtgcactctcagtacaatctgctctgatgccgcatagttaagccagccccgacacccgccaacacccgctgacgcgccctgacgggcttgtctgctcccggcatccgcttacagacaagctgtgaccgtctccgggagctgcatgtgtcagaggttttcaccgtcatcaccgaaacgcgcgagacgaaagggcctcgtgatacgcctatttttataggttaatgtcatgataataatggtttcttaggacggatcgcttgcctgtaacttacacgcgcctcgtatcttttaatgatggaataatttgggaatttactctgtgtttatttatttttatgttttgtatttggattttagaaagtaaataaagaaggtagaagagttacggaatgaagaaaaaaaaataaacaaaggtttaaaaaatttcaacaaaaagcgtactttacatatatatttattagacaagaaaagcagattaaatagatatacattcgattaacgataagtaaaatgtaaaatcacaggattttcgtgtgtggtcttctacacagacaagatgaaacaattcggcattaatacctgagagcaggaagagcaagataaaaggtagtatttgttggcgatccccctagagtcttttacatcttcggaaaacaaaaactattttttctttaatttctttttttactttctatttttaatttatatatttatattaaaaaatttaaattataattatttttatagcacgtgatgaaaaggacccaggtggcacttttcggggaaatgtgcgcggaacccctatttgtttatttttctaaatacattcaaatatgtatccgctcatgagacaataaccctgataaatgcttcaataatattgaaaaaggaagagtatgagtattcaacatttccgtgtcgcccttattcccttttttgcggcattttgccttcctgtttttgctcacccagaaacgctggtgaaagtaaaagatgctgaagatcagttgggtgcacgagtgggttacatcgaactggatctcaacagcggtaagatccttgagagttttcgccccgaagaacgttttccaatgatgagcacttttaaagttctgctatgtggcgcggtattatcccgtattgacgccgggcaagagcaactcggtcgccgcatacactattctcagaatgacttggttgagtactcaccagtcacagaaaagcatcttacggatggcatgacagtaagagaattatgcagtgctgccataaccatgagtgataacactgcggccaacttacttctgacaacgatcggaggaccgaaggagctaaccgcttttttgcacaacatgggggatcatgtaactcgccttgatcgttgggaaccggagctgaatgaagccataccaaacgacgagcgtgacaccacgatgcctgtagcaatggcaacaacgttgcgcaaactattaactggcgaactacttactctagcttcccggcaacaattaatagactggatggaggcggataaagttgcaggaccacttctgcgctcggcccttccggctggctggtttattgctgataaatctggagccggtgagcgtgggtctcgcggtatcattgcagcactggggccagatggtaagccctcccgtatcgtagttatctacacgacggggagtcaggcaactatggatgaacgaaatagacagatcgctgagataggtgcctcactgattaagcattggtaactgtcagaccaagtttactcatatatactttagattgatttaaaacttcatttttaatttaaaaggatctaggtgaagatcctttttgataatctcatgaccaaaatcccttaacgtgagttttcgttccactgagcgtcagaccccgtagaaaagatcaaaggatcttcttgagatcctttttttctgcgcgtaatctgctgcttgcaaacaaaaaaaccaccgctaccagcggtggtttgtttgccggatcaagagctaccaactctttttccgaaggtaactggcttcagcagagcgcagataccaaatactgtccttctagtgtagccgtagttaggccaccacttcaagaactctgtagcaccgcctacatacctcgctctgctaatcctgttaccagtggctgctgccagtggcgataagtcgtgtcttaccgggttggactcaagacgatagttaccggataaggcgcagcggtcgggctgaacggggggttcgtgcacacagcccagcttggagcgaacgacctacaccgaactgagatacctacagcgtgagctatgagaaagcgccacgcttcccgaagggagaaaggcggacaggtatccggtaagcggcagggtcggaacaggagagcgcacgagggagcttccagggggaaacgcctggtatctttatagtcctgtcgggtttcgccacctctgacttgagcgtcgatttttgtgatgctcgtcaggggggcggagcctatggaaaaacgccagcaacgcggcctttttacggttcctggccttttgctggccttttgctcacatgttctttcctgcgttatcccctgattctgtggataaccgtattaccgcctttgagtgagctgataccgctcgccgcagccgaacgaccgagcgcagcgagtcagtgagcgaggaagcggaagagcgcccaatacgcaaaccgcctctccccgcgcgttggccgattcattaatgcagctggcacgacaggtttcccgactggaaagcgggcagtgagcgcaacgcaattaatgtgagttacctcactcattaggcaccccaggctttacactttatgcttccggctcctatgttgtgtggaattgtgagcggataacaatttcacacaggaaacagctatgaccatgattacgccaagcgcgcaattaaccctcactaaagggaac

SEQ ID NO: 3 - DNA, 9465 bp, Artificial Sequence
  Synthetic sequence
aaaagctggagctcgtttaaacggcgcgcctagtacggattagaagccgccgagcgggtgacagccctccgaaggaagactctcctccgtgcgtcctcgtcttcaccggtcgcgttcctgaaacgcagatgtgcctcgcgccgcactgctccgaacaataaagattctacaatactagcttttatggttatgaagaggaaaaattggcagtaacctggccccacaaaccttcaaatgaacgaatcaaattaacaaccataggatgataatgcgattagttttttagccttatttctggggtaattaatcagcgaagcgatgatttttgatctattaacagatatataaatgcaaaaactgcataaccactttaactaatactttcaacattttcggtttgtattacttcttattcaaatgtaataaaagtatcaacaaaaaattgttaatatacctctatactttaacgtcaaggagaaaaaaccccggattctagagcggccgcactagtggatcccccgggctgcaggaattcgatatcaagcttatcgataccgtcgacgtcatatggatccgctgcacggtcctgttccctagcatgtacgtgagcgtatttccttttaaaccacgacgctttgtcttcattcaacgtttcccattgtttttttctactattgctttgctgtgggaaaaacttatcgaaagatgacgactttttcttaattctcgttttaagagcttggtgagcgctaggagtcactgccaggtatcgtttgaacacggcattagtcagggaagtcataacacagtcctttcccgcaattttctttttctattactcttggcctcctctagtacactctatatttttttatgcctcggtaatgattttcatttttttttttccacctagcggatgactctttttttttcttagcgattggcattatcacataatgaattatacattatataaagtaatgtgatttcttcgaagaatatactaaaaaatgagcaggcaagataaacgaaggcaaagatgacagagcagaaagccctagtaaagcgtattacaaatgaaaccaagattcagattgcgatctctttaaagggtggtcccctagcgatagagcactcgatcttcccagaaaaagaggcagaagcagtagcagaacaggccacacaatcgcaagtgattaacgtccacacaggtatagggtttctggaccatatgatacatgctctggccaagcattccggctggtcgctaatcgttgagtgcattggtgacttacacatagacgaccatcacaccactgaagactgcgggattgctctcggtcaagcttttaaagaggccctactggcgcgtggagtaaaaaggtttggatcaggatttgcgcctttggatgaggcactttccagagcggtggtagatctttcgaacaggccgtacgcagttgtcgaacttggtttgcaaagggagaaagtaggagatctctcttgcgagatgatcccgcattttcttgaaagctttgcagaggctagcagaattaccctccacgttgattgtctgcgaggcaagaatgatcatcaccgtagtgagagtgcgttcaaggctcttgcggttgccataagagaagccacctcgcccaatggtaccaacgatgttccctccaccaaaggtgttcttatgtagtgacaccgattatttaaagctgcaggtcgacctcgagtcatgtaattagttatgtcacgcttacattcacgccctccccccacatccgctctaaccgaaaaggaaggagttagacaacctgaagtctaggtccctatttatttttttatagttatgttagtattaagaacgttatttatatttcaaatttttcttttttttctgtacagacgcgtgtacgcatgtaacattatactgaaaaccttgcttgagaaggttttgggacgctcgaaggctttaatttgcggccggtacctaataacttcgtatagcatacattatacgaagttatattaagggttctcgacgttttcgacactggatggcggcgttagtatcgaatcgacagcagtatagcgaccagcattcacatacgattgacgcatgatattactttctgcgcacttaacttcgcatctgggcagatgatgtcgaggcgaaaaaaaatataaatcacgctaacatttgattaaaatagaacaactacaatataaaaaaactatacaaatgacaagttcttgaaaacaagaatctttttattgtcagtactgattagaaaaactcatcgagcatcaaatgaaactgcaatttattcatatcaggattatcaataccatatttttgaaaaagccgtttctgtaatgaaggagaaaactcaccgaggcagttccataggatggcaagatcctggtatcggtctgcgattccgactcgtccaacatcaatacaacctattaatttcccctcgtcaaaaataaggttatcaagtgagaaatcaccatgagtgacgactgaatccggtgagaatggcaaaagcttatgcatttctttccagacttgttcaacaggccagccattacgctcgtcatcaaaatcactcgcatcaaccaaaccgttattcattcgtgattgcgcctgagcgagacgaaatacgcgatcgctgttaaaaggacaattacaaacaggaatcgaatgcaaccggcgcaggaacactgccagcgcatcaacaatattttcacctgaatcaggatattcttctaatacctggaatgctgttttgccggggatcgcagtggtgagtaaccatgcatcatcaggagtacggataaaatgcttgatggtcggaagaggcataaattccgtcagccagtttagtctgaccatctcatctgtaacatcattggcaacgctacctttgccatgtttcagaaacaactctggcgcatcgggcttcccatacaatcgatagattgtcgcacctgattgcccgacattatcgcgagcccatttatacccatataaatcagcatccatgttggaatttaatcgcggcctcgaaacgtgagtcttttccttacccatggttgtttatgttcggatgtgatgtgagaactgtatcctagcaagattttaaaaggaagtatatgaaagaagaacctcagtggcaaatcctaaccttttatatttctctacaggggcgcggcgtggggacaattcaacgcgtctgtgaggggagcgtttccctgctcgcaggtctgcagcgaggagccgtaatttttgcttcgcgccgtgcggccatcaaaatgtatggatgcaaatgattatacatggggatgtatgggctaaatgtacgggcgacagtcacatcatgcccctgagctgcgcacgtcaagactgtcaaggagggtattctgggcctccatgtcgctggccgggtgacccggcggggacgaggcaagctaaacagatctctagacctaataacttcgtatagcatacattatacgaagttatattaagggttgtcttaattaagggtacccaattcgccctatagtgagtcgtattacgcgcgctcactggccgtcgttttacaacgtcgtgactgggaaaaccctggcgttacccaacttaatcgccttgcagcacatccccctttcgccagctggcgtaatagcgaagaggcccgcaccgatcgcccttcccaacagttgcgcagcctgaatggcgaatggcgcgacgcgccctgtagcggcgcattaagcgcggcgggtgtggtggttacgcgcagcgtgaccgctacacttgccagcgccctagcgcccgctcctttcgctttcttcccttcctttctcgccacgttcgccggctttccccgtcaagctctaaatcgggggctccctttagggttccgatttagtgctttacggcacctcgaccccaaaaaacttgattagggtgatggttcacgtagtgggccatcgccctgatagacggtttttcgccctttgacgttggagtccacgttctttaatagtggactcttgttccaaactggaacaacactcaaccctatctcggtctattcttttgatttataagggattttgccgatttcggcctattggttaaaaaatgagctgatttaacaaaaatttaacgcgaattttaacaaaatattaacgtttacaatttcctgatgcggtattttctccttacgcatctgtgcggtatttcacaccgcatatcgacggtcgaggagaacttctagtatatccacatacctaatattattgccttattaaaaatggaatcccaacaattacatcaaaatccacattctcttcaaaatcaattgtcctgtacttccttgttcatgtgtgttcaaaaacgttatatttataggataattatactctatttctcaacaagtaattggttgtttggccgagcggtctaaggcgcctgattcaagaaatatcttgaccgcagttaactgtgggaatactcaggtatcgtaagatgcaagagttcgaatctcttagcaaccattatttttttcctcaacataacgagaacacacaggggcgctatcgcacagaatcaaattcgatgactggaaattttttgttaatttcagaggtcgcctgacgcatatacctttttcaactgaaaaattgggagaaaaaggaaaggtgagaggccggaaccggcttttcatatagaatagagaagcgttcatgactaaatgcttgcatcacaatacttgaagttgacaatattatttaaggacctattgttttttccaataggtggttagcaatcgtcttactttctaacttttcttaccttttacatttcagcaatatatatatatatttcaaggatataccattctaatgtctgcccctatgtctgcccctaagaagatcgtcgttttgccaggtgaccacgttggtcaagaaatcacagccgaagccattaaggttcttaaagctatttctgatgttcgttccaatgtcaagttcgatttcgaaaatcatttaattggtggtgctgctatcgatgctacaggtgtcccacttccagatgaggcgctggaagcctccaagaaggttgatgccgttttgttaggtgctgtgggtggtcctaaatggggtaccggtagtgttagacctgaacaaggtttactaaaaatccgtaaagaacttcaattgtacgccaacttaagaccatgtaactttgcatccgactctcttttagacttatctccaatcaagccacaatttgctaaaggtactgacttcgttgttgtcagagaattagtgggaggtatttactttggtaagagaaaggaagacgatggtgatggtgtcgcttgggatagtgaacaatacaccgttccagaagtgcaaagaatcacaagaatggccgctttcatggccctacaacatgagccaccattgcctatttggtccttggataaagctaatgttttggcctcttcaagattatggagaaaaactgtggaggaaaccatcaagaacgaattccctacattgaaggttcaacatcaattgattgattctgccgccatgatcctagttaagaacccaacccacctaaatggtattataatcaccagcaacatgtttggtgatatcatctccgatgaagcctccgttatcccaggttccttgggtttgttgccatctgcgtccttggcctctttgccagacaagaacaccgcatttggtttgtacgaaccatgccacggttctgctccagatttgccaaagaataaggttgaccctatcgccactatcttgtctgctgcaatgatgttgaaattgtcattgaacttgcctgaagaaggtaaggccattgaagatgcagttaaaaaggttttggatgcaggtatcagaactggtgatttaggtggttccaacagtaccaccgaagtcggtgatgctgtcgccgaagaagttaagaaaatccttgcttaaaaagattctctttttttatgatatttgtacataaactttataaatgaaattcataatagaaacgacacgaaattacaaaatggaatatgttcatagggtagacgaaactatatacgcaatctacatacatttatcaagaaggagaaaaaggaggatagtaaaggaatacaggtaagcaaattgatactaatggctcaacgtgataaggaaaaagaattgcactttaacattaatattgacaaggaggagggcaccacacaaaaagttaggtgtaacagaaaatcatgaaactacgattcctaatttgatattggaggattttctctaaaaaaaaaaaaatacaacaaataaaaaacactcaatgacctgaccatttgatggagtttaagtcaataccttcttgaaccatttcccataatggtgaaagttccctcaagaattttactctgtcagaaacggccttacgacgtagtcgatatggtgcactctcagtacaatctgctctgatgccgcatagttaagccagccccgacacccgccaacacccgctgacgcgccctgacgggcttgtctgctcccggcatccgcttacagacaagctgtgaccgtctccgggagctgcatgtgtcagaggttttcaccgtcatcaccgaaacgcgcgagacgaaagggcctcgtgatacgcctatttttataggttaatgtcatgataataatggtttcttaggacggatcgcttgcctgtaacttacacgcgcctcgtatcttttaatgatggaataatttgggaatttactctgtgtttatttatttttatgttttgtatttggattttagaaagtaaataaagaaggtagaagagttacggaatgaagaaaaaaaaataaacaaaggtttaaaaaatttcaacaaaaagcgtactttacatatatatttattagacaagaaaagcagattaaatagatatacattcgattaacgataagtaaaatgtaaaatcacaggattttcgtgtgtggtcttctacacagacaagatgaaacaattcggcattaatacctgagagcaggaagagcaagataaaaggtagtatttgttggcgatccccctagagtcttttacatcttcggaaaacaaaaactattttttctttaatttctttttttactttctatttttaatttatatatttatattaaaaaatttaaattataattatttttatagcacgtgatgaaaaggacccaggtggcacttttcggggaaatgtgcgcggaacccctatttgtttatttttctaaatacattcaaatatgtatccgctcatgagacaataaccctgataaatgcttcaataatattgaaaaaggaagagtatgagtattcaacatttccgtgtcgcccttattcccttttttgcggcattttgccttcctgtttttgctcacccagaaacgctggtgaaagtaaaagatgctgaagatcagttgggtgcacgagtgggttacatcgaactggatctcaacagcggtaagatccttgagagttttcgccccgaagaacgttttccaatgatgagcacttttaaagttctgctatgtggcgcggtattatcccgtattgacgccgggcaagagcaactcggtcgccgcatacactattctcagaatgacttggttgagtactcaccagtcacagaaaagcatcttacggatggcatgacagtaagagaattatgcagtgctgccataaccatgagtgataacactgcggccaacttacttctgacaacgatcggaggaccgaaggagctaaccgcttttttgcacaacatgggggatcatgtaactcgccttgatcgttgggaaccggagctgaatgaagccataccaaacgacgagcgtgacaccacgatgcctgtagcaatggcaacaacgttgcgcaaactattaactggcgaactacttactctagcttcccggcaacaattaatagactggatggaggcggataaagttgcaggaccacttctgcgctcggcccttccggctggctggtttattgctgataaatctggagccggtgagcgtgggtctcgcggtatcattgcagcactggggccagatggtaagccctcccgtatcgtagttatctacacgacggggagtcaggcaactatggatgaacgaaatagacagatcgctgagataggtgcctcactgattaagcattggtaactgtcagaccaagtttactcatatatactttagattgatttaaaacttcatttttaatttaaaaggatctaggtgaagatcctttttgataatctcatgaccaaaatcccttaacgtgagttttcgttccactgagcgtcagaccccgtagaaaagatcaaaggatcttcttgagatcctttttttctgcgcgtaatctgctgcttgcaaacaaaaaaaccaccgctaccagcggtggtttgtttgccggatcaagagctaccaactctttttccgaaggtaactggcttcagcagagcgcagataccaaatactgtccttctagtgtagccgtagttaggccaccacttcaagaactctgtagcaccgcctacatacctcgctctgctaatcctgttaccagtggctgctgccagtggcgataagtcgtgtcttaccgggttggactcaagacgatagttaccggataaggcgcagcggtcgggctgaacggggggttcgtgcacacagcccagcttggagcgaacgacctacaccgaactgagatacctacagcgtgagctatgagaaagcgccacgcttcccgaagggagaaaggcggacaggtatccggtaagcggcagggtcggaacaggagagcgcacgagggagcttccagggggaaacgcctggtatctttatagtcctgtcgggtttcgccacctctgacttgagcgtcgatttttgtgatgctcgtcaggggggcggagcctatggaaaaacgccagcaacgcggcctttttacggttcctggccttttgctggccttttgctcacatgttctttcctgcgttatcccctgattctgtggataaccgtattaccgcctttgagtgagctgataccgctcgccgcagccgaacgaccgagcgcagcgagtcagtgagcgaggaagcggaagagcgcccaatacgcaaaccgcctctccccgcgcgttggccgattcattaatgcagctggcacgacaggtttcccgactggaaagcgggcagtgagcgcaacgcaattaatgtgagttacctcactcattaggcaccccaggctttacactttatgcttccggctcctatgttgtgtggaattgtgagcggataacaatttcacacaggaaacagctatgaccatgattacgccaagcgcgcaattaaccctcactaaagggaac

SEQ ID NO: 4 - DNA, 8342 bp, Artificial Sequence
  Synthetic sequence
ttacgccaagcgcgcaattaaccctcactaaagggaacaaaagctggagctcgtttaaacggcgcgcctagtacggattagaagccgccgagcgggtgacagccctccgaaggaagactctcctccgtgcgtcctcgtcttcaccggtcgcgttcctgaaacgcagatgtgcctcgcgccgcactgctccgaacaataaagattctacaatactagcttttatggttatgaagaggaaaaattggcagtaacctggccccacaaaccttcaaatgaacgaatcaaattaacaaccataggatgataatgcgattagttttttagccttatttctggggtaattaatcagcgaagcgatgatttttgatctattaacagatatataaatgcaaaaactgcataaccactttaactaatactttcaacattttcggtttgtattacttcttattcaaatgtaataaaagtatcaacaaaaaattgttaatatacctctatactttaacgtcaaggagaaaaaaccccggattctagagcggccgcactagtggatcccccgggctgcaggaattcgatatcaagcttatcgataccgtcgacgtcatatggatccgctgcacggtcctgttccctagcatgtacgtgagcgtatttccttttaaaccacgacgctttgtcttcattcaacgtttcccattgtttttttctactattgctttgctgtgggaaaaacttatcgaaagatgacgactttttcttaattctcgttttaagagcttggtgagcgctaggagtcactgccaggtatcgtttgaacacggcattagtcagggaagtcataacacagtcctttcccgcaattttctttttctattactcttggcctcctctagtacactctatatttttttatgcctcggtaatgattttcatttttttttttccacctagcggatgactctttttttttcttagcgattggcattatcacataatgaattatacattatataaagtaatgtgatttcttcgaagaatatactaaaaaatgagcaggcaagataaacgaaggcaaagatgacagagcagaaagccctagtaaagcgtattacaaatgaaaccaagattcagattgcgatctctttaaagggtggtcccctagcgatagagcactcgatcttcccagaaaaagaggcagaagcagtagcagaacaggccacacaatcgcaagtgattaacgtccacacaggtatagggtttctggaccatatgatacatgctctggccaagcattccggctggtcgctaatcgttgagtgcattggtgacttacacatagacgaccatcacaccactgaagactgcgggattgctctcggtcaagcttttaaagaggccctactggcgcgtggagtaaaaaggtttggatcaggatttgcgcctttggatgaggcactttccagagcggtggtagatctttcgaacaggccgtacgcagttgtcgaacttggtttgcaaagggagaaagtaggagatctctcttgcgagatgatcccgcattttcttgaaagctttgcagaggctagcagaattaccctccacgttgattgtctgcgaggcaagaatgatcatcaccgtagtgagagtgcgttcaaggctcttgcggttgccataagagaagccacctcgcccaatggtaccaacgatgttccctccaccaaaggtgttcttatgtagtgacaccgattatttaaagctgcaggtcgacctcgagtcatgtaattagttatgtcacgcttacattcacgccctccccccacatccgctctaaccgaaaaggaaggagttagacaacctgaagtctaggtccctatttatttttttatagttatgttagtattaagaacgttatttatatttcaaatttttcttttttttctgtacagacgcgtgtacgcatgtaacattatactgaaaaccttgcttgagaaggttttgggacgctcgaaggctttaatttgcggccggtacctaataacttcgtatagcatacattatacgaagttatattaagggttctcgacgttttcgacactggatggcggcgttagtatcgaatcgacagcagtatagcgaccagcattcacatacgattgacgcatgatattactttctgcgcacttaacttcgcatctgggcagatgatgtcgaggcgaaaaaaaatataaatcacgctaacatttgattaaaatagaacaactacaatataaaaaaactatacaaatgacaagttcttgaaaacaagaatctttttattgtcagtactgattagaaaaactcatcgagcatcaaatgaaactgcaatttattcatatcaggattatcaataccatatttttgaaaaagccgtttctgtaatgaaggagaaaactcaccgaggcagttccataggatggcaagatcctggtatcggtctgcgattccgactcgtccaacatcaatacaacctattaatttcccctcgtcaaaaataaggttatcaagtgagaaatcaccatgagtgacgactgaatccggtgagaatggcaaaagcttatgcatttctttccagacttgttcaacaggccagccattacgctcgtcatcaaaatcactcgcatcaaccaaaccgttattcattcgtgattgcgcctgagcgagacgaaatacgcgatcgctgttaaaaggacaattacaaacaggaatcgaatgcaaccggcgcaggaacactgccagcgcatcaacaatattttcacctgaatcaggatattcttctaatacctggaatgctgttttgccggggatcgcagtggtgagtaaccatgcatcatcaggagtacggataaaatgcttgatggtcggaagaggcataaattccgtcagccagtttagtctgaccatctcatctgtaacatcattggcaacgctacctttgccatgtttcagaaacaactctggcgcatcgggcttcccatacaatcgatagattgtcgcacctgattgcccgacattatcgcgagcccatttatacccatataaatcagcatccatgttggaatttaatcgcggcctcgaaacgtgagtcttttccttacccatggttgtttatgttcggatgtgatgtgagaactgtatcctagcaagattttaaaaggaagtatatgaaagaagaacctcagtggcaaatcctaaccttttatatttctctacaggggcgcggcgtggggacaattcaacgcgtctgtgaggggagcgtttccctgctcgcaggtctgcagcgaggagccgtaatttttgcttcgcgccgtgcggccatcaaaatgtatggatgcaaatgattatacatggggatgtatgggctaaatgtacgggcgacagtcacatcatgcccctgagctgcgcacgtcaagactgtcaaggagggtattctgggcctccatgtcgctggccgggtgacccggcggggacgaggcaagctaaacagatctctagacctaataacttcgtatagcatacattatacgaagttatattaagggttgtcttaattaagggtacccaattcgccctatagtgagtcgtattacgcgcgctcactggccgtcgttttacaacgtcgtgactgggaaaaccctggcgttacccaacttaatcgccttgcagcacatccccctttcgccagctggcgtaatagcgaagaggcccgcaccgatcgcccttcccaacagttgcgcagcctgaatggcgaatggcgcgacgcgccctgtagcggcgcattaagcgcggcgggtgtggtggttacgcgcagcgtgaccgctacacttgccagcgccctagcgcccgctcctttcgctttcttcccttcctttctcgccacgttcgccggctttccccgtcaagctctaaatcgggggctccctttagggttccgatttagtgctttacggcacctcgaccccaaaaaacttgattagggtgatggttcacgtagtgggccatcgccctgatagacggtttttcgccctttgacgttggagtccacgttctttaatagtggactcttgttccaaactggaacaacactcaaccctatctcggtctattcttttgatttataagggattttgccgatttcggcctattggttaaaaaatgagctgatttaacaaaaatttaacgcgaattttaacaaaatattaacgtttacaatttcctgatgcggtattttctccttacgcatctgtgcggtatttcacaccgcatagggtaataactgatataattaaattgaagctctaatttgtgagtttagtatacatgcatttacttataatacagttttttagttttgctggccgcatcttctcaaatatgcttcccagcctgcttttctgtaacgttcaccctctaccttagcatcccttccctttgcaaatagtcctcttccaacaataataatgtcagatcctgtagagaccacatcatccacggttctatactgttgacccaatgcgtctcccttgtcatctaaacccacaccgggtgtcataatcaaccaatcgtaaccttcatctcttccacccatgtctctttgagcaataaagccgataacaaaatctttgtcgctcttcgcaatgtcaacagtacccttagtatattctccagtagatagggagcccttgcatgacaattctgctaacatcaaaaggcctctaggttcctttgttacttcttctgccgcctgcttcaaaccgctaacaatacctgggcccaccacaccgtgtgcattcgtaatgtctgcccattctgctattctgtatacacccgcagagtactgcaatttgactgtattaccaatgtcagcaaattttctgtcttcgaagagtaaaaaattgtacttggcggataatgcctttagcggcttaactgtgccctccatggaaaaatcagtcaagatatccacatgtgtttttagtaaacaaattttgggacctaatgcttcaactaactccagtaattccttggtggtacgaacatccaatgaagcacacaagtttgtttgcttttcgtgcatgatattaaatagcttggcagcaacaggactaggatgagtagcagcacgttccttatatgtagctttcgacatgatttatcttcgtttcctgcaggtttttgttctgtgcagttgggttaagaatactgggcaatttcatgtttcttcaacactacatatgcgtatatataccaatctaagtctgtgctccttccttcgttcttccttctgttcggagattaccgaatcaaaaaaatttcaaagaaaccgaaatcaaaaaaaagaataaaaaaaaaatgatgaattgaattgaaaagctgtggtatggtgcactctcagtacaatctgctctgatgccgcatagttaagccagccccgacacccgccaacacccgctgacgcgccctgacgggcttgtctgctcccggcatccgcttacagacaagctgtgaccgtctccgggagctgcatgtgtcagaggttttcaccgtcatcaccgaaacgcgcgagacgaaagggcctcgtgatacgcctatttttataggttaatgtcatgataataatggtttcttaggacggatcgcttgcctgtaacttacacgcgcctcgtatcttttaatgatggaataatttgggaatttactctgtgtttatttatttttatgttttgtatttggattttagaaagtaaataaagaaggtagaagagttacggaatgaagaaaaaaaaataaacaaaggtttaaaaaatttcaacaaaaagcgtactttacatatatatttattagacaagaaaagcagattaaatagatatacattcgattaacgataagtaaaatgtaaaatcacaggattttcgtgtgtggtcttctacacagacaagatgaaacaattcggcattaatacctgagagcaggaagagcaagataaaaggtagtatttgttggcgatccccctagagtcttttacatcttcggaaaacaaaaactattttttctttaatttctttttttactttctatttttaatttatatatttatattaaaaaatttaaattataattatttttatagcacgtgatgaaaaggacccaggtggcacttttcggggaaatgtgcgcggaacccctatttgtttatttttctaaatacattcaaatatgtatccgctcatgagacaataaccctgataaatgcttcaataatattgaaaaaggaagagtatgagtattcaacatttccgtgtcgcccttattcccttttttgcggcattttgccttcctgtttttgctcacccagaaacgctggtgaaagtaaaagatgctgaagatcagttgggtgcacgagtgggttacatcgaactggatctcaacagcggtaagatccttgagagttttcgccccgaagaacgttttccaatgatgagcacttttaaagttctgctatgtggcgcggtattatcccgtattgacgccgggcaagagcaactcggtcgccgcatacactattctcagaatgacttggttgagtactcaccagtcacagaaaagcatcttacggatggcatgacagtaagagaattatgcagtgctgccataaccatgagtgataacactgcggccaacttacttctgacaacgatcggaggaccgaaggagctaaccgcttttttgcacaacatgggggatcatgtaactcgccttgatcgttgggaaccggagctgaatgaagccataccaaacgacgagcgtgacaccacgatgcctgtagcaatggcaacaacgttgcgcaaactattaactggcgaactacttactctagcttcccggcaacaattaatagactggatggaggcggataaagttgcaggaccacttctgcgctcggcccttccggctggctggtttattgctgataaatctggagccggtgagcgtgggtctcgcggtatcattgcagcactggggccagatggtaagccctcccgtatcgtagttatctacacgacggggagtcaggcaactatggatgaacgaaatagacagatcgctgagataggtgcctcactgattaagcattggtaactgtcagaccaagtttactcatatatactttagattgatttaaaacttcatttttaatttaaaaggatctaggtgaagatcctttttgataatctcatgaccaaaatcccttaacgtgagttttcgttccactgagcgtcagaccccgtagaaaagatcaaaggatcttcttgagatcctttttttctgcgcgtaatctgctgcttgcaaacaaaaaaaccaccgctaccagcggtggtttgtttgccggatcaagagctaccaactctttttccgaaggtaactggcttcagcagagcgcagataccaaatactgtccttctagtgtagccgtagttaggccaccacttcaagaactctgtagcaccgcctacatacctcgctctgctaatcctgttaccagtggctgctgccagtggcgataagtcgtgtcttaccgggttggactcaagacgatagttaccggataaggcgcagcggtcgggctgaacggggggttcgtgcacacagcccagcttggagcgaacgacctacaccgaactgagatacctacagcgtgagctatgagaaagcgccacgcttcccgaagggagaaaggcggacaggtatccggtaagcggcagggtcggaacaggagagcgcacgagggagcttccagggggaaacgcctggtatctttatagtcctgtcgggtttcgccacctctgacttgagcgtcgatttttgtgatgctcgtcaggggggcggagcctatggaaaaacgccagcaacgcggcctttttacggttcctggccttttgctggccttttgctcacatgttctttcctgcgttatcccctgattctgtggataaccgtattaccgcctttgagtgagctgataccgctcgccgcagccgaacgaccgagcgcagcgagtcagtgagcgaggaagcggaagagcgcccaatacgcaaaccgcctctccccgcgcgttggccgattcattaatgcagctggcacgacaggtttcccgactggaaagcgggcagtgagcgcaacgcaattaatgtgagttacctcactcattaggcaccccaggctttacactttatgcttccggctcctatgttgtgtggaattgtgagcggataacaatttcacacaggaaacagctatgaccatga

SEQ ID NO: 5 - DNA, 5856 bp, Artificial Sequence
  Synthetic sequence
acggattagaagccgccgagcgggtgacagccctccgaaggaagactctcctccgtgcgtcctcgtcttcaccggtcgcgttcctgaaacgcagatgtgcctcgcgccgcactgctccgaacaataaagattctacaatactagcttttatggttatgaagaggaaaaattggcagtaacctggccccacaaaccttcaaatgaacgaatcaaattaacaaccataggatgataatgcgattagttttttagccttatttctggggtaattaatcagcgaagcgatgatttttgatctattaacagatatataaatgcaaaaactgcataaccactttaactaatactttcaacattttcggtttgtattacttcttattcaaatgtaataaaagtatcaacaaaaaattgttaatatacctctatactttaacgtcaaggagaaaaaaccccggatcggactactagcagctgtaatacgactcactatagggaatattaagcttggtaccgagctcggatccactagtaacggccgccagtgtgctggaattctgcagatatccatcacactggcggccgctcgagcatgcatctagagggccgcatcatgtaattagttatgtcacgcttacattcacgccctccccccacatccgctctaaccgaaaaggaaggagttagacaacctgaagtctaggtccctatttatttttttatagttatgttagtattaagaacgttatttatatttcaaatttttcttttttttctgtacagacgcgtgtacgcatgtaacattatactgaaaaccttgcttgagaaggttttgggacgctcgaaggctttaatttgcggccctgcattaatgaatcggccaacgcgcggggagaggcggtttgcgtattgggcgctcttccgcttcctcgctcactgactcgctgcgctcggtcgttcggctgcggcgagcggtatcagctcactcaaaggcggtaatacggttatccacagaatcaggggataacgcaggaaagaacatgtgagcaaaaggccagcaaaagcccaggaaccgtaaaaaggccgcgttgctggcgtttttccataggctccgcccccctgacgagcatcacaaaaatcgacgctcaagtcagaggtggcgaaacccgacaggactataaagataccaggcgtttccccctggaagctccctcgtgcgctctcctgttccgaccctgccgcttaccggatacctgtccgcctttctcccttcgggaagcgtggcgctttctcatagctcacgctgtaggtatctcagttcggtgtaggtcgttcgctccaagctgggctgtgtgcacgaaccccccgttcagcccgaccgctgcgccttatccggtaactatcgtcttgagtccaacccggtaagacacgacttatcgccactggcagcagccactggtaacaggattagcagagcgaggtatgtaggcggtgctacagagttcttgaagtggtggcctaactacggctacactagaaggacagtatttggtatctgcgctctgctgaagccagttaccttcggaaaaagagttggtagctcttgatccggcaaacaaaccaccgctggtagcggtggtttttttgtttgcaagcagcagattacgcgcagaaaaaaaggatctcaagaagatcctttgatcttttctacggggtctgacgctcagtggaacgaaaactcacgttaagggattttggtcatgagattatcaaaaaggatcttcacctagatccttttaaattaaaaatgaagttttaaatcaatctaaagtatatatgagtaaacttggtctgacagttaccaatgcttaatcagtgaggcacctatctcagcgatctgtctatttcgttcatccatagttgcctgactccccgtcgtgtagataactacgatacgggagcgcttaccatctggccccagtgctgcaatgataccgcgagacccacgctcaccggctccagatttatcagcaataaaccagccagccggaagggccgagcgcagaagtggtcctgcaactttatccgcctccattcagtctattaattgttgccgggaagctagagtaagtagttcgccagttaatagtttgcgcaacgttgttggcattgctacaggcatcgtggtgtcactctcgtcgtttggtatggcttcattcagctccggttcccaacgatcaaggcgagttacatgatcccccatgttgtgcaaaaaagcggttagctccttcggtcctccgatcgttgtcagaagtaagttggccgcagtgttatcactcatggttatggcagcactgcataattctcttactgtcatgccatccgtaagatgcttttctgtgactggtgagtactcaaccaagtcattctgagaatagtgtatgcggcgaccgagttgctcttgcccggcgtcaatacgggataatagtgtatcacatagcagaactttaaaagtgctcatcattggaaaacgttcttcggggcgaaaactctcaaggatcttaccgctgttgagatccagttcgatgtaacccactcgtgcacccaactgatcttcagcatcttttactttcaccagcgtttctgggtgagcaaaaacaggaaggcaaaatgccgcaaaaaagggaataagggcgacacggaaatgttgaatactcatactcttcctttttcaatgggtaataactgatataattaaattgaagctctaatttgtgagtttagtatacatgcatttacttataatacagttttttagttttgctggccgcatcttctcaaatatgcttcccagcctgcttttctgtaacgttcaccctctaccttagcatcccttccctttgcaaatagtcctcttccaacaataataatgtcagatcctgtagagaccacatcatccacggttctatactgttgacccaatgcgtctcccttgtcatctaaacccacaccgggtgtcataatcaaccaatcgtaaccttcatctcttccacccatgtctctttgagcaataaagccgataacaaaatctttgtcgctcttcgcaatgtcaacagtacccttagtatattctccagtagatagggagcccttgcatgacaattctgctaacatcaaaaggcctctaggttcctttgttacttcttctgccgcctgcttcaaaccgctaacaatacctgggcccaccacaccgtgtgcattcgtaatgtctgcccattctgctattctgtatacacccgcagagtactgcaatttgactgtattaccaatgtcagcaaattttctgtcttcgaagagtaaaaaattgtacttggcggataatgcctttagcggcttaactgtgccctccatggaaaaatcagtcaagatatccacatgtgtttttagtaaacaaattttgggacctaatgcttcaactaactccagtaattccttggtggtacgaacatccaatgaagcacacaagtttgtttgcttttcgtgcatgatattaaatagcttggcagcaacaggactaggatgagtagcagcacgttccttatatgtagctttcgacatgatttatcttcgtttcctgcaggtttttgttctgtgcagttgggttaagaatactgggcaatttcatgtttcttcaacactacatatgcgtatatataccaatctaagtctgtgctccttccttcgttcttccttctgttcggagattaccgaatcaaaaaaatttcaaagaaaccgaaatcaaaaaaaagaataaaaaaaaaatgatgaattgaattgaaaagctagcttatcgatgataagctgtcaaagatgagaattaattccacggactatagactatactagatactccgtctactgtacgatacacttccgctcaggtccttgtcctttaacgaggccttaccactcttttgttactctattgatccagctcagcaaaggcagtgtgatctaagattctatcttcgcgatgtagtaaaactagctagaccgagaaagagactagaaatgcaaaaggcacttctacaatggctgccatcattattatccgatgtgacgctgcagcttctcaatgatattcgaatacgctttgaggagatacagcctaatatccgacaaactgttttacagatttacgatcgtacttgttacccatcattgaattttgaacatccgaacctgggagttttccctgaaacagatagtatatttgaacctgtataataatatatagtctagcgctttacggaagacaatgtatgtatttcggttcctggagaaactattgcatctattgcataggtaatcttgcacgtcgcatccccggttcattttctgcgtttccatcttgcacttcaatagcatatctttgttaacgaagcatctgtgcttcattttgtagaacaaaaatgcaacgcgagagcgctaatttttcaaacaaagaatctgagctgcatttttacagaacagaaatgcaacgcgaaagcgctattttaccaacgaagaatctgtgcttcatttttgtaaaacaaaaatgcaacgcgacgagagcgctaatttttcaaacaaagaatctgagctgcatttttacagaacagaaatgcaacgcgagagcgctattttaccaacaaagaatctatacttcttttttgttctacaaaaatgcatcccgagagcgctatttttctaacaaagcatcttagattactttttttctcctttgtgcgctctataatgcagtctcttgataactttttgcactgtaggtccgttaaggttagaagaaggctactttggtgtctattttctcttccataaaaaaagcctgactccacttcccgcgtttactgattactagcgaagctgcgggtgcattttttcaagataaaggcatccccgattatattctataccgatgtggattgcgcatactttgtgaacagaaagtgatagcgttgatgattcttcattggtcagaaaattatgaacggtttcttctattttgtctctatatactacgtataggaaatgtttacattttcgtattgttttcgattcactctatgaatagttcttactacaatttttttgtctaaagagtaatactagagataaacataaaaaatgtagaggtcgagtttagatgcaagttcaaggagcgaaaggtggatgggtaggttatatagggatatagcacagagatatatagcaaagagatacttttgagcaatgtttgtggaagcggtattcgcaatgggaagctccaccccggttgataatcagaaaagccccaaaaacaggaagattgtataagcaaatatttaaattgtaaacgttaatattttgttaaaattcgcgttaaatttttgttaaatcagctcattttttaacgaatagcccgaaatcggcaaaatcccttataaatcaaaagaatagaccgagatagggttgagtgttgttccagtttccaacaagagtccactattaaagaacgtggactccaacgtcaaagggcgaaaaagggtctatcagggcgatggcccactacgtgaaccatcaccctaatcaagttttttggggtcgaggtgccgtaaagcagtaaatcggaagggtaaacggatgcccccatttagagcttgacggggaaagccggcgaacgtggcgagaaaggaagggaagaaagcgaaaggagcgggggctagggcggtgggaagtgtaggggtcacgctgggcgtaaccaccacacccgccgcgcttaatggggcgctacagggcgcgtggggatgatccactagt

SEQ ID NO: 6 - DNA, 7758 bp, Artificial Sequence
  Synthetic sequence
tcgcgcgtttcggtgatgacggtgaaaacctctgacacatgcagctcccggagacggtcacagcttgtctgtaagcggatgccgggagcagacaagcccgtcagggcgcgtcagcgggtgttggcgggtgtcggggctggcttaactatgcggcatcagagcagattgtactgagagtgcaccatatcgactacgtcgtaaggccgtttctgacagagtaaaattcttgagggaactttcaccattatgggaaatgcttcaagaaggtattgacttaaactccatcaaatggtcaggtcattgagtgttttttatttgttgtatttttttttttttagagaaaatcctccaatatcaaattaggaatcgtagtttcatgattttctgttacacctaactttttgtgtggtgccctcctccttgtcaatattaatgttaaagtgcaattctttttccttatcacgttgagccattagtatcaatttgcttacctgtattcctttactatcctcctttttctccttcttgataaatgtatgtagattgcgtatatagtttcgtctaccctatgaacatattccattttgtaatttcgtgtcgtttctattatgaatttcatttataaagtttatgtacaaatatcataaaaaaagagaatctttttaagcaaggattttcttaacttcttcggcgacagcatcaccgacttcggtggtactgttggaaccacctaaatcaccagttctgatacctgcatccaaaacctttttaactgcatcttcaatggccttaccttcttcaggcaagttcaatgacaatttcaacatcattgcagcagacaagatagtggcgatagggtcaaccttattctttggcaaatctggagcagaaccgtggcatggttcgtacaaaccaaatgcggtgttcttgtctggcaaagaggccaaggacgcagatggcaacaaacccaaggaacctgggataacggaggcttcatcggagatgatatcaccaaacatgttgctggtgattataataccatttaggtgggttgggttcttaactaggatcatggcggcagaatcaatcaattgatgttgaaccttcaatgtagggaattcgttcttgatggtttcctccacagtttttctccataatcttgaagaggccaaaagattagctttatccaaggaccaaataggcaatggtggctcatgttgtagggccatgaaagcggccattcttgtgattctttgcacttctggaacggtgtattgttcactatcccaagcgacaccatcaccatcgtcttcctttctcttaccaaagtaaatacctcccactaattctctgacaacaacgaagtcagtacctttagcaaattgtggcttgattggagataagtctaaaagagagtcggatgcaaagttacatggtcttaagttggcgtacaattgaagttctttacggatttttagtaaaccttgttcaggtctaacactaccggtaccccatttaggaccagccacagcacctaacaaaacggcatcaaccttcttggaggcttccagcgcctcatctggaagtgggacacctgtagcatcgatagcagcaccaccaattaaatgattttcgaaatcgaacttgacattggaacgaacatcagaaatagctttaagaaccttaatggcttcggctgtgatttcttgaccaacgtggtcacctggcaaaacgacgatcttcttaggggcagacataggggcagacattagaatggtatatccttgaaatatatatatatattgctgaaatgtaaaaggtaagaaaagttagaaagtaagacgattgctaaccacctattggaaaaaacaataggtccttaaataatattgtcaacttcaagtattgtgatgcaagcatttagtcatgaacgcttctctattctatatgaaaagccggttccggcctctcacctttcctttttctcccaatttttcagttgaaaaaggtatatgcgtcaggcgacctctgaaattaacaaaaaatttccagtcatcgaatttgattctgtgcgatagcgcccctgtgtgttctcgttatgttgaggaaaaaaataatggttgctaagagattcgaactcttgcatcttacgatacctgagtattcccacagttaactgcggtcaagatatttcttgaatcaggcgccttagaccgctcggccaaacaaccaattacttgttgagaaatagagtataattatcctataaatataacgtttttgaacacacatgaacaaggaagtacaggacaattgattttgaagagaatgtggattttgatgtaattgttgggattccatttttaataaggcaataatattaggtatgtggatatactagaagttctcctcgaccgtcgatatgcggtgtgaaataccgcacagatgcgtaaggagaaaataccgcatcaggaaattgtaaacgttaatattttgttaaaattcgcgttaaatttttgttaaatcagctcattttttaaccaataggccgaaatcggcaaaatcccttataaatcaaaagaatagaccgagatagggttgagtgttgttccagtttggaacaagagtccactattaaagaacgtggactccaacgtcaaagggcgaaaaaccgtctatcagggcgatggcccactacgtgaaccatcaccctaatcaagttttttggggtcgaggtgccgtaaagcactaaatcggaaccctaaagggagcccccgatttagagcttgacggggaaagccggcgaacgtggcgagaaaggaagggaagaaagcgaaaggagcgggcgctagggcgctggcaagtgtagcggtcacgctgcgcgtaaccaccacacccgccgcgcttaatgcgccgctacagggcgcgtcgcgccattcgccattcaggctgcgcaactgttgggaagggcgatcggtgcgggcctcttcgctattacgccagctgaattggagcgacctcatgctatacctgagaaagcaacctgacctacaggaaagagttactcaagaataagaattttcgttttaaaacctaagagtcactttaaaatttgtatacacttattttttttataacttatttaataataaaaatcataaatcataagaaattcgcttatttagaagtgtcaacaacgtatctaccaacgatttgacccttttccatcttttcgtaaatttctggcaaggtagacaagccgacaaccttgattggagacttgaccaaacctctggcgaagaattgttaattaagagctcagatcttatcgtcgtcatccttgtaatccatcgatactagtgcggccgccctttagtgagggttgaattcgaattttcaaaaattcttactttttttttggatggacgcaaagaagtttaataatcatattacatggcattaccaccatatacatatccatatacatatccatatctaatcttacttatatgttgtggaaatgtaaagagccccattatcttagcctaaaaaaaccttctctttggaactttcagtaatacgcttaactgctcattgctatattgaagtacggattagaagccgccgagcgggtgacagccctccgaaggaagactctcctccgtgcgtcctcgtcttcaccggtcgcgttcctgaaacgcagatgtgcctcgcgccgcactgctccgaacaataaagattctacaatactagcttttatggttatgaagaggaaaaattggcagtaacctggccccacaaaccttcaaatgaacgaatcaaattaacaaccataggatgataatgcgattagttttttagccttatttctggggtaattaatcagcgaagcgatgatttttgatctattaacagatatataaatgcaaaaactgcataaccactttaactaatactttcaacattttcggtttgtattacttcttattcaaatgtaataaaagtatcaacaaaaaattgttaatatacctctatactttaacgtcaaggagaaaaaaccccggatccgtaatacgactcactatagggcccgggcgtcgacatggaacagaagttgatttccgaagaagacctcgagtaagcttggtaccgcggctagctaagatccgctctaaccgaaaaggaaggagttagacaacctgaagtctaggtccctatttatttttttatagttatgttagtattaagaacgttatttatatttcaaatttttcttttttttctgtacagacgcgtgtacgcatgtaacattatactgaaaaccttgcttgagaaggttttgggacgctcgaagatccagctgcattaatgaatcggccaacgcgcggggagaggcggtttgcgtattgggcgctcttccgcttcctcgctcactgactcgctgcgctcggtcgttcggctgcggcgagcggtatcagctcactcaaaggcggtaatacggttatccacagaatcaggggataacgcaggaaagaacatgtgagcaaaaggccagcaaaaggccaggaaccgtaaaaaggccgcgttgctggcgtttttccataggctccgcccccctgacgagcatcacaaaaatcgacgctcaagtcagaggtggcgaaacccgacaggactataaagataccaggcgtttccccctggaagctccctcgtgcgctctcctgttccgaccctgccgcttaccggatacctgtccgcctttctcccttcgggaagcgtggcgctttctcatagctcacgctgtaggtatctcagttcggtgtaggtcgttcgctccaagctgggctgtgtgcacgaaccccccgttcagcccgaccgctgcgccttatccggtaactatcgtcttgagtccaacccggtaagacacgacttatcgccactggcagcagccactggtaacaggattagcagagcgaggtatgtaggcggtgctacagagttcttgaagtggtggcctaactacggctacactagaaggacagtatttggtatctgcgctctgctgaagccagttaccttcggaaaaagagttggtagctcttgatccggcaaacaaaccaccgctggtagcggtggtttttttgtttgcaagcagcagattacgcgcagaaaaaaaggatctcaagaagatcctttgatcttttctacggggtctgacgctcagtggaacgaaaactcacgttaagggattttggtcatgagattatcaaaaaggatcttcacctagatccttttaaattaaaaatgaagttttaaatcaatctaaagtatatatgagtaaacttggtctgacagttaccaatgcttaatcagtgaggcacctatctcagcgatctgtctatttcgttcatccatagttgcctgactccccgtcgtgtagataactacgatacgggagggcttaccatctggccccagtgctgcaatgataccgcgagacccacgctcaccggctccagatttatcagcaataaaccagccagccggaagggccgagcgcagaagtggtcctgcaactttatccgcctccatccagtctattaattgttgccgggaagctagagtaagtagttcgccagttaatagtttgcgcaacgttgttgccattgctacaggcatcgtggtgtcacgctcgtcgtttggtatggcttcattcagctccggttcccaacgatcaaggcgagttacatgatcccccatgttgtgcaaaaaagcggttagctccttcggtcctccgatcgttgtcagaagtaagttggccgcagtgttatcactcatggttatggcagcactgcataattctcttactgtcatgccatccgtaagatgcttttctgtgactggtgagtactcaaccaagtcattctgagaatagtgtatgcggcgaccgagttgctcttgcccggcgtcaatacgggataataccgcgccacatagcagaactttaaaagtgctcatcattggaaaacgttcttcggggcgaaaactctcaaggatcttaccgctgttgagatccagttcgatgtaacccactcgtgcacccaactgatcttcagcatcttttactttcaccagcgtttctgggtgagcaaaaacaggaaggcaaaatgccgcaaaaaagggaataagggcgacacggaaatgttgaatactcatactcttcctttttcaatattattgaagcatttatcagggttattgtctcatgagcggatacatatttgaatgtatttagaaaaataaacaaataggggttccgcgcacatttccccgaaaagtgccacctgaacgaagcatctgtgcttcattttgtagaacaaaaatgcaacgcgagagcgctaatttttcaaacaaagaatctgagctgcatttttacagaacagaaatgcaacgcgaaagcgctattttaccaacgaagaatctgtgcttcatttttgtaaaacaaaaatgcaacgcgagagcgctaatttttcaaacaaagaatctgagctgcatttttacagaacagaaatgcaacgcgagagcgctattttaccaacaaagaatctatacttcttttttgttctacaaaaatgcatcccgagagcgctatttttctaacaaagcatcttagattactttttttctcctttgtgcgctctataatgcagtctcttgataactttttgcactgtaggtccgttaaggttagaagaaggctactttggtgtctattttctcttccataaaaaaagcctgactccacttcccgcgtttactgattactagcgaagctgcgggtgcattttttcaagataaaggcatccccgattatattctataccgatgtggattgcgcatactttgtgaacagaaagtgatagcgttgatgattcttcattggtcagaaaattatgaacggtttcttctattttgtctctatatactacgtataggaaatgtttacattttcgtattgttttcgattcactctatgaatagttcttactacaatttttttgtctaaagagtaatactagagataaacataaaaaatgtagaggtcgagtttagatgcaagttcaaggagcgaaaggtggatgggtaggttatatagggatatagcacagagatatatagcaaagagatacttttgagcaatgtttgtggaagcggtattcgcaatattttagtagctcgttacagtccggtgcgtttttggttttttgaaagtgcgtcttcagagcgcttttggttttcaaaagcgctctgaagttcctatactttctagagaataggaacttcggaataggaacttcaaagcgtttccgaaaacgagcgcttccgaaaatgcaacgcgagctgcgcacatacagctcactgttcacgtcgcacctatatctgcgtgttgcctgtatatatatatacatgagaagaacggcatagtgcgtgtttatgcttaaatgcgtacttatatgcgtctatttatgtaggatgaaaggtagtctagtacctcctgtgatattatcccattccatgcggggtatcgtatgcttccttcagcactaccctttagctgttctatatgctgccactcctcaattggattagtctcatccttcaatgctatcatttcctttgatattggatcatactaagaaaccattattatcatgacattaacctataaaaataggcgtatcacgaggccctttcgtc

SEQ ID NO: 7 - DNA, 14189 bp, Artificial Sequence
  Synthetic sequence
aaaagctggagctcgtttaaacggcgcgccgagactgcagcattactttgagaagtcgagtttatcattatcaatactgccatttcaaagaatacgtaaataattaatagtagtgattttcctaactttatttagtcaaaaaattagccttttaattctgctgtaacccgtacatgcccaaaatagggggcgggttacacagaatatataacatcgtaggtgtctgggtgaacagtttattcctggcatccactaaatataatggagcccgctttttaagctggcatccagaaaaaaaaagaatcccagcaccaaaatattgttttcttcaccaaccatcagttcataggtccattctcttagcgcaactacagagaacaggggcacaaacaggcaaaaaacgggcacaacctcaatggagtgatgcaacctgcctggagtaaatgatgacacaaggcaattgacccacgcatgtatctatctcattttcttacaccttctattaccttctgctctctctgatttggaaaaagctgaaaaaaaaggttgaaaccagttccctgaaattattcccctacttgactaataagtatataaagacggtaggtattgattgtaattctgtaaatctatttcttaaacttcttaaattctacttttatagttagtcttttttttagttttaaaacaccaagaacttagtttcgaaaaacaatggaaacagtatcaaagatcgaccaacaaaaccaagcaaagatctggaaacaaatctacgggttcgccgagtccctcgtcttaaagtgtgcagtgcaacttgaaatagctgaaacattgcataacaacgtgaagcctatgtcattgtctgaactagcaagcaaactacctgtcgctcagccagttaatgaggataggttgttccgtatcatgagataccttgtccatatggagttgtttaagatagacgctacaacacagaagtactccctagcacctccagccaagtatctgctcagagggtgggagaaaagtatggttgattctatcctgtgtattaacgataaagactttttagccccatggcatcacttgggcgatggcttaacaggaaattgcgatgcgtttgaaaaggctcttggtaagtctatctgggtatacatgtctgttaacccagagaaaaaccaattgttcaacgcggcaatggcatgcgacactagactcgtaacttcagcgttggccaatgaatgcaaatcaatcttttctgacggaatttctacgctagttgatgtaggaggtggtacaggaactgcagttaaagctatatctaaagcattccctgacattaagtgtactatctacgatctacctcatgtgatagctgatagcccagaaattccaaacattaccaaaatctccggtgatatgttcaaatcaataccatctgccgatgcgattttcatgaaatgtatcttacatgattggaatgatgatgaatgtattcaaatcttaaagagatgtaaggaagcattacctaagggcggtaaggttatcattgtcgatgttgttattgatatggatagtactcacccatacgctaagataagacttaccctggatttggacatgatgttgaatacaggtggcaaggagcgaaccaaggaagagtggaaaacgttgtttgatgctgctggtttcgcctcacacaaagttactcagatcagtgctgtccaatccgtgatcgaagcctatccatattgatcatgtaattagttatgtcacgcttacattcacgccctcctcccacatccgctctaaccgaaaaggaaggagttagacaacctgaagtctaggtccctatttattttttttaatagttatgttagtattaagaacgttatttatatttcaaatttttcttttttttctgtacaaacgcgtgtacgcatgtaacattatactgaaaaccttgcttgagaaggttttgggacgctcgaaggctttaatttgcggcaatcacatcaccatgagttgtctcatggcgggggtcggaatgattaaagaaaggggctgtgggcgagattggagactgcagcattactttgagaagatccaactggcaccgctggcttgaacaacaataccagccttccaacttctgtaaataacggcggtacgccagtgccaccagtaccgttacctttcggtatacctcctttccccatgtttccaatgcccttcatgcctccaacggctactatcacaaatcctcatcaagctgacgcaagccctaagaaatgaataacaatactgacagtactaaataattgcctacttggcttcacatacgttgcatacgtcgatatagataataatgataatgacagcaggattatcgtaatacgtaatagttgaaaatctcaaaaatgtgtgggtcattacgtaaataatgataggaatgggattcttctatttttcctttttccattctagcagccgtcgggaaaacgtggcatcctctctttcgggctcaattggagtcacgctgccgtgagcatcctctctttccatatctaacaactgagcacgtaaccaatggaaaagcatgagcttagcgttgctccaaaaaagtattggatggttaataccatttgtctgttctcttctgactttgactcctcaaaaaaaaaaaatctacaatcaacagatcgcttcaattacgccctcacaaaaacttttttccttcttcttcgcccacgttaaattttatccctcatgttgtctaacggatttctgcacttgatttattataaaaagacaaagacataatacttctctatcaatttcagttattgttcttccttgcgttattcttctgttcttctttttcttttgtcatatataaccataaccaagtaatacataaaaacaatgggttccttggatgcgaagccagccgctgcgacacaagaggtttctatcaaagatcaggctcaactgtggaacatcatctacggtttcgctgacagtttggttttacgttgcgctgtggaaataggtattgcagatatcatcaaaaacaacgacggcgcaattacattggcccaattagctgctaagttgccaattacgaatgttagttcagattacctatacagaatggttaggtacttagttcatctaaacattatcgaacaggaaacatgcaatgggggcgttgaaaaggtctatagtcttaagcctgtagggactttgttgttaagagatgctgaacgttctatggtccctatgattctcggaatgacccaaaaagacttcatggtttcctggcacttcatgaaagagggtcttggtaacggatctactacggccttcgaaaagggcatgggtatggacatatggaagtatctagaggggaaccctgatcaatcacaacttttcaatgagggtatggctggtgaaactaggctgcttactaagacattgatcgaagattgtagagatacatttcagggattagattcacttgtggatataggtggtggaaatggtactacaatcaaagctatctacgaggcatttccacatatcaaatgcacactgtacgatttgcctcatgtcgtcgcaaattctcatgatctaccaaacatcgaaaaggtccctggcgatatgttcaagagcgtaccatcagcccaagccatcttactgaaactgatcttacacgattggactgacgaagagtgtgtaaacatattgaaaaagtgtaaggaagctataccaaaggaaacaggaaaggtcatcatagtagacgtagcactcgaagaggaatccaatcacgaactaactaaaaccagactcattttggatattgatatgcttgtgaacaccggcggtagagagagaactgccgatgactgggagaacttattgaaaagagccggcttcagatctcataagattcgaccaattagagcaatacaatctgttatagaagcttttccataatggacttcttcgccagaggtttggtcaagtctccaatcaaggttgtcggcttgtctaccttgccagaaatttacgaaaagatggaaaagggtcaaatcgttggtagatacgttgttgacacttctaaataagcgaatttcttatgatttatgatttttattattaaataagttataaaaaaaataagtgtatacaaattttaaagtgactcttaggttttaaaacgaaaattcttattcttgagtaactctttcctgtaggtcaggttgctttctcaggtatagcatgaggtcgctcttattgaccacacctctaccggcatgcggcaatcacatcaccatgagttgtccagttaataaaccgtggcaaacatgatggtggcctaatggaggtcaccagagactgcagcattactttgagaagacatgcgactgggtgagcatatgttccgctgatgtgatgtgcaagataaacaagcaaggcagaaactaacttcttcttcatgtaataaacacaccccgcgtttatttacctatctctaaacttcaacaccttatatcataactaatatttcttgagataagcacactgcacccataccttccttaaaaacgtagcttccagtttttggtggttccggcttccttcccgattccgcccgctaaacgcatatttttgttgcctggtggcatttgcaaaatgcataacctatgcatttaaaagattatgtatgctcttctgacttttcgtgtgatgaggctcgtggaaaaaatgaataatttatgaatttgagaacaattttgtgttgttacggtattttactatggaataatcaatcaattgaggattttatgcaaatatcgtttgaatatttttccgaccctttgagtacttttcttcataattgcataatattgtccgctgcccctttttctgttagacggtgtcttgatctacttgctatcgttcaacaccaccttattttctaactattttttttttagctcatttgaatcagcttatggtgatggcacatttttgcataaacctagctgtcctcgttgaacataggaaaaaaaaatatataaacaaggctctttcactctccttgcaatcagatttgggtttgttccctttattttcatatttcttgtcatattcctttctcaattattattttctactcataacctcacgcaaaataacacagtcaaatcaaaaacaatgcaactgaaagcaaaggaagagctattgagaaacatggaactcggtctaatcccagatcaggagattagacaacttatcagagttgagttggaaaagagactgcagtggggctacaaggaaacgcacgaagagcaattatctcagcttttagatttggtgcactccctcaagggtatgaagatggccaccgaaatggaaaaccttgatttgaaattgtacgaagctccaatggaatttctaaagattcagcacggatcaaatatgaagcaatcagctggttactatacagatgaatctacaactctagatgaggctgaaatagctatgttggatctttacatggagagagcacaaatcaaggacggtcaatctgtcttggatttgggctgtgggctgggagcggttgctctatttggtgccaataagttcaaaaagtgtcaattcactggagtgacatctagtgtcgaacaaaaagattacattgaaggcaagtgtaaggaactaaaactgactaatgttaaagtcttactcgcagatataaccacatatgaaacagaagagcgtttcgacaggatctttgcagttgagttgatagagcatatgaaaaactaccagcttctcttgaaaaagatttctgaatggatgaaggacgatggcttgttgttcgtggaacatgtatgccataagacattagcatatcattacgaacctgtagacgccgaggattggtacaccaattacatcttccctgctggtacacttactctatcatcagcctccatgttactttactttcaagatgatgtatcagttgtcaatcaatggacattaagcggtaaacactattctagaagtcatgaagagtggttgaaaaacatggacaaaaacattgtagagtttaaggaaatcatgagatcaatcactaagacagagaaggaagcgattaagctgctgaacttctggcgaatattctgcatgtgtggtgccgaattgttcggatacaaaaacggggaagagtggatgttaactcatctactctttaagaaaaagtaaaacaaatcgctcttaaatatatacctaaagaacattaaagctatattataagcaaagatacgtaaattttgcttatattattatacacatatcatatttctatatttttaagatttggttatataatgtacgtaatgcaaaggaaataaattttatacattattgaacagcgtccaagtaactacattatgtgcactaatagtttagcgtcgtgaagactttattgtgtcgcgaaaagtaaaaattttaaaaattagagcaccttgaacttgcgaaaaaggttctcatcaactgtttaaaaggaggatatcaggtcctatttctgacaaacaatatacaaatttagtttcaaagatgaatcagtgcgcgaaggacataactcatgaagcctccagtataccggcaatcacatcaccatgagttgtgcggccgcggtacctaataacttcgtatagcatacattatacgaagttatattaagggttctcgacgttttcgacactggatggcggcgttagtatcgaatcgacagcagtatagcgaccagcattcacatacgattgacgcatgatattactttctgcgcacttaacttcgcatctgggcagatgatgtcgaggcgaaaaaaaatataaatcacgctaacatttgattaaaatagaacaactacaatataaaaaaactatacaaatgacaagttcttgaaaacaagaatctttttattgtcagtactgattagaaaaactcatcgagcatcaaatgaaactgcaatttattcatatcaggattatcaataccatatttttgaaaaagccgtttctgtaatgaaggagaaaactcaccgaggcagttccataggatggcaagatcctggtatcggtctgcgattccgactcgtccaacatcaatacaacctattaatttcccctcgtcaaaaataaggttatcaagtgagaaatcaccatgagtgacgactgaatccggtgagaatggcaaaagcttatgcatttctttccagacttgttcaacaggccagccattacgctcgtcatcaaaatcactcgcatcaaccaaaccgttattcattcgtgattgcgcctgagcgagacgaaatacgcgatcgctgttaaaaggacaattacaaacaggaatcgaatgcaaccggcgcaggaacactgccagcgcatcaacaatattttcacctgaatcaggatattcttctaatacctggaatgctgttttgccggggatcgcagtggtgagtaaccatgcatcatcaggagtacggataaaatgcttgatggtcggaagaggcataaattccgtcagccagtttagtctgaccatctcatctgtaacatcattggcaacgctacctttgccatgtttcagaaacaactctggcgcatcgggcttcccatacaatcgatagattgtcgcacctgattgcccgacattatcgcgagcccatttatacccatataaatcagcatccatgttggaatttaatcgcggcctcgaaacgtgagtcttttccttacccatggttgtttatgttcggatgtgatgtgagaactgtatcctagcaagattttaaaaggaagtatatgaaagaagaacctcagtggcaaatcctaaccttttatatttctctacaggggcgcggcgtggggacaattcaacgcgtctgtgaggggagcgtttccctgctcgcaggtctgcagcgaggagccgtaatttttgcttcgcgccgtgcggccatcaaaatgtatggatgcaaatgattatacatggggatgtatgggctaaatgtacgggcgacagtcacatcatgcccctgagctgcgcacgtcaagactgtcaaggagggtattctgggcctccatgtcgctggccgggtgacccggcggggacgaggcaagctaaacagatctctagacctaataacttcgtatagcatacattatacgaagttatattaagggttgtcttaattaagggtacccaattcgccctatagtgagtcgtattacgcgcgctcactggccgtcgttttacaacgtcgtgactgggaaaaccctggcgttacccaacttaatcgccttgcagcacatccccctttcgccagctggcgtaatagcgaagaggcccgcaccgatcgcccttcccaacagttgcgcagcctgaatggcgaatggcgcgacgcgccctgtagcggcgcattaagcgcggcgggtgtggtggttacgcgcagcgtgaccgctacacttgccagcgccctagcgcccgctcctttcgctttcttcccttcctttctcgccacgttcgccggctttccccgtcaagctctaaatcgggggctccctttagggttccgatttagtgctttacggcacctcgaccccaaaaaacttgattagggtgatggttcacgtagtgggccatcgccctgatagacggtttttcgccctttgacgttggagtccacgttctttaatagtggactcttgttccaaactggaacaacactcaaccctatctcggtctattcttttgatttataagggattttgccgatttcggcctattggttaaaaaatgagctgatttaacaaaaatttaacgcgaattttaacaaaatattaacgtttacaatttcctgatgcggtattttctccttacgcatctgtgcggtatttcacaccgcatatcgacggtcgaggagaacttctagtatatccacatacctaatattattgccttattaaaaatggaatcccaacaattacatcaaaatccacattctcttcaaaatcaattgtcctgtacttccttgttcatgtgtgttcaaaaacgttatatttataggataattatactctatttctcaacaagtaattggttgtttggccgagcggtctaaggcgcctgattcaagaaatatcttgaccgcagttaactgtgggaatactcaggtatcgtaagatgcaagagttcgaatctcttagcaaccattatttttttcctcaacataacgagaacacacaggggcgctatcgcacagaatcaaattcgatgactggaaattttttgttaatttcagaggtcgcctgacgcatatacctttttcaactgaaaaattgggagaaaaaggaaaggtgagaggccggaaccggcttttcatatagaatagagaagcgttcatgactaaatgcttgcatcacaatacttgaagttgacaatattatttaaggacctattgttttttccaataggtggttagcaatcgtcttactttctaacttttcttaccttttacatttcagcaatatatatatatatttcaaggatataccattctaatgtctgcccctatgtctgcccctaagaagatcgtcgttttgccaggtgaccacgttggtcaagaaatcacagccgaagccattaaggttcttaaagctatttctgatgttcgttccaatgtcaagttcgatttcgaaaatcatttaattggtggtgctgctatcgatgctacaggtgtcccacttccagatgaggcgctggaagcctccaagaaggttgatgccgttttgttaggtgctgtgggtggtcctaaatggggtaccggtagtgttagacctgaacaaggtttactaaaaatccgtaaagaacttcaattgtacgccaacttaagaccatgtaactttgcatccgactctcttttagacttatctccaatcaagccacaatttgctaaaggtactgacttcgttgttgtcagagaattagtgggaggtatttactttggtaagagaaaggaagacgatggtgatggtgtcgcttgggatagtgaacaatacaccgttccagaagtgcaaagaatcacaagaatggccgctttcatggccctacaacatgagccaccattgcctatttggtccttggataaagctaatgttttggcctcttcaagattatggagaaaaactgtggaggaaaccatcaagaacgaattccctacattgaaggttcaacatcaattgattgattctgccgccatgatcctagttaagaacccaacccacctaaatggtattataatcaccagcaacatgtttggtgatatcatctccgatgaagcctccgttatcccaggttccttgggtttgttgccatctgcgtccttggcctctttgccagacaagaacaccgcatttggtttgtacgaaccatgccacggttctgctccagatttgccaaagaataaggttgaccctatcgccactatcttgtctgctgcaatgatgttgaaattgtcattgaacttgcctgaagaaggtaaggccattgaagatgcagttaaaaaggttttggatgcaggtatcagaactggtgatttaggtggttccaacagtaccaccgaagtcggtgatgctgtcgccgaagaagttaagaaaatccttgcttaaaaagattctctttttttatgatatttgtacataaactttataaatgaaattcataatagaaacgacacgaaattacaaaatggaatatgttcatagggtagacgaaactatatacgcaatctacatacatttatcaagaaggagaaaaaggaggatagtaaaggaatacaggtaagcaaattgatactaatggctcaacgtgataaggaaaaagaattgcactttaacattaatattgacaaggaggagggcaccacacaaaaagttaggtgtaacagaaaatcatgaaactacgattcctaatttgatattggaggattttctctaaaaaaaaaaaaatacaacaaataaaaaacactcaatgacctgaccatttgatggagtttaagtcaataccttcttgaaccatttcccataatggtgaaagttccctcaagaattttactctgtcagaaacggccttacgacgtagtcgatatggtgcactctcagtacaatctgctctgatgccgcatagttaagccagccccgacacccgccaacacccgctgacgcgccctgacgggcttgtctgctcccggcatccgcttacagacaagctgtgaccgtctccgggagctgcatgtgtcagaggttttcaccgtcatcaccgaaacgcgcgagacgaaagggcctcgtgatacgcctatttttataggttaatgtcatgataataatggtttcttaggacggatcgcttgcctgtaacttacacgcgcctcgtatcttttaatgatggaataatttgggaatttactctgtgtttatttatttttatgttttgtatttggattttagaaagtaaataaagaaggtagaagagttacggaatgaagaaaaaaaaataaacaaaggtttaaaaaatttcaacaaaaagcgtactttacatatatatttattagacaagaaaagcagattaaatagatatacattcgattaacgataagtaaaatgtaaaatcacaggattttcgtgtgtggtcttctacacagacaagatgaaacaattcggcattaatacctgagagcaggaagagcaagataaaaggtagtatttgttggcgatccccctagagtcttttacatcttcggaaaacaaaaactattttttctttaatttctttttttactttctatttttaatttatatatttatattaaaaaatttaaattataattatttttatagcacgtgatgaaaaggacccaggtggcacttttcggggaaatgtgcgcggaacccctatttgtttatttttctaaatacattcaaatatgtatccgctcatgagacaataaccctgataaatgcttcaataatattgaaaaaggaagagtatgagtattcaacatttccgtgtcgcccttattcccttttttgcggcattttgccttcctgtttttgctcacccagaaacgctggtgaaagtaaaagatgctgaagatcagttgggtgcacgagtgggttacatcgaactggatctcaacagcggtaagatccttgagagttttcgccccgaagaacgttttccaatgatgagcacttttaaagttctgctatgtggcgcggtattatcccgtattgacgccgggcaagagcaactcggtcgccgcatacactattctcagaatgacttggttgagtactcaccagtcacagaaaagcatcttacggatggcatgacagtaagagaattatgcagtgctgccataaccatgagtgataacactgcggccaacttacttctgacaacgatcggaggaccgaaggagctaaccgcttttttgcacaacatgggggatcatgtaactcgccttgatcgttgggaaccggagctgaatgaagccataccaaacgacgagcgtgacaccacgatgcctgtagcaatggcaacaacgttgcgcaaactattaactggcgaactacttactctagcttcccggcaacaattaatagactggatggaggcggataaagttgcaggaccacttctgcgctcggcccttccggctggctggtttattgctgataaatctggagccggtgagcgtgggtctcgcggtatcattgcagcactggggccagatggtaagccctcccgtatcgtagttatctacacgacggggagtcaggcaactatggatgaacgaaatagacagatcgctgagataggtgcctcactgattaagcattggtaactgtcagaccaagtttactcatatatactttagattgatttaaaacttcatttttaatttaaaaggatctaggtgaagatcctttttgataatctcatgaccaaaatcccttaacgtgagttttcgttccactgagcgtcagaccccgtagaaaagatcaaaggatcttcttgagatcctttttttctgcgcgtaatctgctgcttgcaaacaaaaaaaccaccgctaccagcggtggtttgtttgccggatcaagagctaccaactctttttccgaaggtaactggcttcagcagagcgcagataccaaatactgtccttctagtgtagccgtagttaggccaccacttcaagaactctgtagcaccgcctacatacctcgctctgctaatcctgttaccagtggctgctgccagtggcgataagtcgtgtcttaccgggttggactcaagacgatagttaccggataaggcgcagcggtcgggctgaacggggggttcgtgcacacagcccagcttggagcgaacgacctacaccgaactgagatacctacagcgtgagctatgagaaagcgccacgcttcccgaagggagaaaggcggacaggtatccggtaagcggcagggtcggaacaggagagcgcacgagggagcttccagggggaaacgcctggtatctttatagtcctgtcgggtttcgccacctctgacttgagcgtcgatttttgtgatgctcgtcaggggggcggagcctatggaaaaacgccagcaacgcggcctttttacggttcctggccttttgctggccttttgctcacatgttctttcctgcgttatcccctgattctgtggataaccgtattaccgcctttgagtgagctgataccgctcgccgcagccgaacgaccgagcgcagcgagtcagtgagcgaggaagcggaagagcgcccaatacgcaaaccgcctctccccgcgcgttggccgattcattaatgcagctggcacgacaggtttcccgactggaaagcgggcagtgagcgcaacgcaattaatgtgagttacctcactcattaggcaccccaggctttacactttatgcttccggctcctatgttgtgtggaattgtgagcggataacaatttcacacaggaaacagctatgaccatgattacgccaagcgcgcaattaaccctcactaaagggaac

SEQ ID NO: 8 - DNA, 14606 bp, Artificial Sequence
  Synthetic sequence
gcggccgcggtacctaataacttcgtatagcatacattatacgaagttatattaagggttctcgacgttttcgacactggatggcggcgttagtatcgaatcgacagcagtatagcgaccagcattcacatacgattgacgcatgatattactttctgcgcacttaacttcgcatctgggcagatgatgtcgaggcgaaaaaaaatataaatcacgctaacatttgattaaaatagaacaactacaatataaaaaaactatacaaatgacaagttcttgaaaacaagaatctttttattgtcagtactgattagaaaaactcatcgagcatcaaatgaaactgcaatttattcatatcaggattatcaataccatatttttgaaaaagccgtttctgtaatgaaggagaaaactcaccgaggcagttccataggatggcaagatcctggtatcggtctgcgattccgactcgtccaacatcaatacaacctattaatttcccctcgtcaaaaataaggttatcaagtgagaaatcaccatgagtgacgactgaatccggtgagaatggcaaaagcttatgcatttctttccagacttgttcaacaggccagccattacgctcgtcatcaaaatcactcgcatcaaccaaaccgttattcattcgtgattgcgcctgagcgagacgaaatacgcgatcgctgttaaaaggacaattacaaacaggaatcgaatgcaaccggcgcaggaacactgccagcgcatcaacaatattttcacctgaatcaggatattcttctaatacctggaatgctgttttgccggggatcgcagtggtgagtaaccatgcatcatcaggagtacggataaaatgcttgatggtcggaagaggcataaattccgtcagccagtttagtctgaccatctcatctgtaacatcattggcaacgctacctttgccatgtttcagaaacaactctggcgcatcgggcttcccatacaatcgatagattgtcgcacctgattgcccgacattatcgcgagcccatttatacccatataaatcagcatccatgttggaatttaatcgcggcctcgaaacgtgagtcttttccttacccatggttgtttatgttcggatgtgatgtgagaactgtatcctagcaagattttaaaaggaagtatatgaaagaagaacctcagtggcaaatcctaaccttttatatttctctacaggggcgcggcgtggggacaattcaacgcgtctgtgaggggagcgtttccctgctcgcaggtctgcagcgaggagccgtaatttttgcttcgcgccgtgcggccatcaaaatgtatggatgcaaatgattatacatggggatgtatgggctaaatgtacgggcgacagtcacatcatgcccctgagctgcgcacgtcaagactgtcaaggagggtattctgggcctccatgtcgctggccgggtgacccggcggggacgaggcaagctaaacagatctctagacctaataacttcgtatagcatacattatacgaagttatattaagggttgtcttaattaagggtgcccaattcgccctatagtgagtcgtattacgcgcgctcactggccgtcgttttacaacgtcgtgactgggaaaaccctggcgttacccaacttaatcgccttgcagcacatccccctttcgccagctggcgtaatagcgaagaggcccgcaccgatcgcccttcccaacagttgcgcagcctgaatggcgaatggcgcgacgcgccctgtagcggcgcattaagcgcggcgggtgtggtggttacgcgcagcgtgaccgctacacttgccagcgccctagcgcccgctcctttcgctttcttcccttcctttctcgccacgttcgccggctttccccgtcaagctctaaatcgggggctccctttagggttccgatttagtgctttacggcacctcgaccccaaaaaacttgattagggtgatggttcacgtagtgggccatcgccctgatagacggtttttcgccctttgacgttggagtccacgttctttaatagtggactcttgttccaaactggaacaacactcaaccctatctcggtctattcttttgatttataagggattttgccgatttcggcctattggttaaaaaatgagctgatttaacaaaaatttaacgcgaattttaacaaaatattaacgtttacaatttcctgatgcggtattttctccttacgcatctgtgcggtatttcacaccgcatagatccgtcgagttcaagagaaaaaaaaagaaaaagcaaaaagaaaaaaggaaagcgcgcctcgttcagaatgacacgtatagaatgatgcattaccttgtcatcttcagtatcatactgttcgtatacatacttactgacattcataggtatacatatatacacatgtatatatatcgtatgctgcagctttaaataatcggtgtcactatttcttagcatttttgacgaaatttgctattttgttagagtcttttacaccatttgtctccacacctccgcttacatcaacaccaataacgccatttaatctaagcgcatcaccaacattttctggcgtcagtccaccagctaacataaaatgtaagctttcggggctctcttgccttccaacccagtcagaaatcgagttccaatccaaaagttcacctgtcccacctgcttctgaatcaaacaagggaataaacgaatgaggtttctgtgaagctgcactgagtagtatgttgcagtcttttggaaatacgagtcttttaataactggcaaaccgaggaactcttggtattcttgccacgactcatctccatgcagttggacgatatcaatgccgtaatcattgaccagagccaaaacatcctccttaggttgattacgaaacacgccaaccaagtatttcggagtgcctgaactatttttatatgcttttacaagacttgaaattttccttgcaataaccgggtcaattgttctctttctattgggcacacatataatacccagcaagtcagcatcggaatctagagcacattctgcggcctctgtgctctgcaagccgcaaactttcaccaatggaccagaactacctgtgaaattaataacagacatctttgccttcgtttatcttgcctgctcattttttagtatattcttcgaagaaatcacattactttatataatgtataattcattatgtgataatgccaatcgctaagaaaaaaaaagagtcatccgctaggggaaaaaaaaaaatgaaaatcattaccgaggcataaaaaaatatagagtgtactagaggaggccaagagtaatagaaaaagaaaattgcgggaaaggactgtgttatgacttccctgactaatgccgtgttcaaacgatacctggcagtgactcctagcgctcaccaagctcttaaaacgggaatttatggtgcactctcagtacaatctgctctgatgccgcatagttaagccagccccgacacccgccaacacgcgctgacgcgccctgacgggcttgtctgctcccggcatccgcttacagacaagctgtgaccgtctccgggagctgcatgtgtcagaggttttcaccgtcatcaccgaaacgcgcgagacgaaagggcctcgtgatacgcctatttttataggttaatgtcatgataataatggtttcttaggacggatcgcttgcctgtaacttacacgcgcctcgtatcttttaatgatggaataatttgggaatttactctgtgtttatttatttttatgttttgtatttggattttagaaagtaaataaagaaggtagaagagttacggaatgaagaaaaaaaaataaacaaaggtttaaaaaatttcaacaaaaagcgtactttacatatatatttattagacaagaaaagcagattaaatagatatacattcgattaacgataagtaaaatgtaaaatcacaggattttcgtgtgtggtcttctacacagacaagatgaaacaattcggcattaatacctgagagcaggaagagcaagataaaaggtagtatttgttggcgatccccctagagtcttttacatcttcggaaaacaaaaactattttttctttaatttctttttttactttctatttttaatttatatatttatattaaaaaatttaaattataattatttttatagcacgtgatgaaaaggacccaggtggcacttttcggggaaatgtgcgcggaacccctatttgtttatttttctaaatacattcaaatatgtatccgctcatgagacaataaccctgataaatgcttcaataatattgaaaaaggaagagtatgagtattcaacatttccgtgtcgcccttattcccttttttgcggcattttgccttcctgtttttgctcacccagaaacgctggtgaaagtaaaagatgctgaagatcagttgggtgcacgagtgggttacatcgaactggatctcaacagcggtaagatccttgagagttttcgccccgaagaacgttttccaatgatgagcacttttaaagttctgctatgtggcgcggtattatcccgtattgacgccgggcaagagcaactcggtcgccgcatacactattctcagaatgacttggttgagtactcaccagtcacagaaaagcatcttacggatggcatgacagtaagagaattatgcagtgctgccataaccatgagtgataacactgcggccaacttacttctgacaacgatcggaggaccgaaggagctaaccgcttttttgcacaacatgggggatcatgtaactcgccttgatcgttgggaaccggagctgaatgaagccataccaaacgacgagcgtgacaccacgatgcctgtagcaatggcaacaacgttgcgcaaactattaactggcgaactacttactctagcttcccggcaacaattaatagactggatggaggcggataaagttgcaggaccacttctgcgctcggcccttccggctggctggtttattgctgataaatctggagccggtgagcgtgggtctcgcggtatcattgcagcactggggccagatggtaagccctcccgtatcgtagttatctacacgacggggagtcaggcaactatggatgaacgaaatagacagatcgctgagataggtgcctcactgattaagcattggtaactgtcagaccaagtttactcatatatactttagattgatttaaaacttcatttttaatttaaaaggatctaggtgaagatcctttttgataatctcatgaccaaaatcccttaacgtgagttttcgttccactgagcgtcagaccccgtagaaaagatcaaaggatcttcttgagatcctttttttctgcgcgtaatctgctgcttgcaaacaaaaaaaccaccgctaccagcggtggtttgtttgccggatcaagagctaccaactctttttccgaaggtaactggcttcagcagagcgcagataccaaatactgtccttctagtgtagccgtagttaggccaccacttcaagaactctgtagcaccgcctacatacctcgctctgctaatcctgttaccagtggctgctgccagtggcgataagtcgtgtcttaccgggttggactcaagacgatagttaccggataaggcgcagcggtcgggctgaacggggggttcgtgcacacagcccagcttggagcgaacgacctacaccgaactgagatacctacagcgtgagctatgagaaagcgccacgcttcccgaagggagaaaggcggacaggtatccggtaagcggcagggtcggaacaggagagcgcacgagggagcttccagggggaaacgcctggtatctttatagtcctgtcgggtttcgccacctctgacttgagcgtcgatttttgtgatgctcgtcaggggggcggagcctatggaaaaacgccagcaacgcggcctttttacggttcctggccttttgctggccttttgctcacatgttctttcctgcgttatcccctgattctgtggataaccgtattaccgcctttgagtgagctgataccgctcgccgcagccgaacgaccgagcgcagcgagtcagtgagcgaggaagcggaagagcgcccaatacgcaaaccgcctctccccgcgcgttggccgattcattaatgcagctggcacgacaggtttcccgactggaaagcgggcagtgagcgcaacgcaattaatgtgagttacctcactcattaggcaccccaggctttacactttatgcttccggctcctatgttgtgtggaattgtgagcggataacaatttcacacaggaaacagctatgaccatgattacgccaagcgcgcaattaaccctcactaaagggaacaaaagctggagctcgtttaaacggcgcgccgagactgcagcattactttgagaagtcgagtttatcattatcaatactgccatttcaaagaatacgtaaataattaatagtagtgattttcctaactttatttagtcaaaaaattagccttttaattctgctgtaacccgtacatgcccaaaatagggggcgggttacacagaatatataacatcgtaggtgtctgggtgaacagtttattcctggcatccactaaatataatggagcccgctttttaagctggcatccagaaaaaaaaagaatcccagcaccaaaatattgttttcttcaccaaccatcagttcataggtccattctcttagcgcaactacagagaacaggggcacaaacaggcaaaaaacgggcacaacctcaatggagtgatgcaacctgcctggagtaaatgatgacacaaggcaattgacccacgcatgtatctatctcattttcttacaccttctattaccttctgctctctctgatttggaaaaagctgaaaaaaaaggttgaaaccagttccctgaaattattcccctacttgactaataagtatataaagacggtaggtattgattgtaattctgtaaatctatttcttaaacttcttaaattctacttttatagttagtcttttttttagttttaaaacaccaagaacttagtttcgaaaaacaatggaggtgacattttggttgataacttgtggagtggtagtagcatttgcattagcaaaactactattcggcaagaaatcatctatgtccacaatggaatggccatcaggtccaaagacgttgcccataattgggaaccttcatcaattaggaggagaagcatttcatgtctgtttggcaaacttggccaaagtatatggaggtgtttttaccatatgggttggaagttggcgtccgtttatagtcataagcgatgtcgataaagcttgggaagttcttgttaacaaatcttcggattattcagctagagacatgcctgatattactaaaatcatatctgcaaactggaagaatatttctcatggtgattccggtccgttttggcataatttaagaaaaggtcttcaaggtgttgctttaactccttttaatgttgcgtctcaatatcatttgcaagaaagggacatgcagaatttgatcaaatccatgaaaaaaaaggcgtcccagaaaaatgggattttgaaaccacttgattatgtcaaagaagagactgttcggttactaagtcgacttatcttcggtcaagatttcgtcgatgaggatttcgttgttggtatgcatcaagcactggacgagttagtaagtataagtgggtatgcaagtttagctgatgcttttaaattctgtgagaatctaccaagccataagaaaactgtccgagcagttcacgctatcaaaattcggttcgataatttgattcgtccgcatatcgtctcaaatcctccgacaaacacttacttacattttcttttatctcaagattttagtgaagatgttataatctctgccattcttgaagtttatgacttaggggttgacagcactgcatccacaacagtttgggctcttacgttccttgtccgcgaacaaaagattcaggaaaaactgtaccgcgagatcaataacgtaaccggagggaaaaaaccggtgaaagttgaagatttgaacaaattgccatatttgcaagcagtgatgaaagaaacaatgaggatgaaaccaatcgcaccaatggcgattcctcacaaggcttcaaaagatacttccttaatgggtaaaaagatcaacaaaggtgcggtggtaatggtaaatctttatgctattcatcataaccctgccgttttcccggaaccgtataagttcatgcccgagagattcctaaaggatgctaatagtgatggaagtttgggtgatataaagaaaatggaaagttcattgttagcattcagtgccggtatgcgaatctgtgctggaatggagcttggtaagctacaactagctttcggtcttgcaagtttggtgaatgagttcaaatgggattgctttgctgaagggaagttgcctgatcttagtgaagaacactgtttcattctgttgatgaagaacccacttgaagccaaaattactcctcgtatccattaatcatgtaattagttatgtcacgcttacattcacgccctcctcccacatccgctctaaccgaaaaggaaggagttagacaacctgaagtctaggtccctatttattttttttaatagttatgttagtattaagaacgttatttatatttcaaatttttcttttttttctgtacaaacgcgtgtacgcatgtaacattatactgaaaaccttgcttgagaaggttttgggacgctcgaaggctttaatttgcggcaatcacatcaccatgagttgtctcatggcgggggtcggaatgattaaagaaaggggctgtgggcgagattggagactgcagcattactttgagaagacatgcgactgggtgagcatatgttccgctgatgtgatgtgcaagataaacaagcaagacagaaactaacttcttcttcatgtaataaacacaccccgcgtttatttacctatctttaaacttcaacaccttatatcataactaatatttcttgagataagcacactgcacccataccttccttaaaaacgtagcttccagtttttggtggttctggcttccttcccgattccgcccgctaaacgcataattttgttgcctggtggcatttgcaaaatgcataacctatgcatttaaaagattatgtatgctcttctgacttttcgtgtgatgaggctcgtggaaaaaatgaataatttatgaatttgagaacaattttgtgttgttacggtattttactatggaataatcaatcaattgaggattttatgcaaatatcgtttgaatatttttccgaccctttgagtacttttcttcataattgcataatattgtccgctgcccgtttttctgttagacggtgtcttgatctacttgctatcgttcaacaccaccttattttctaactattttttttttagctcatttgaatcagcttatggtgatggcacatttttgcataaacctagctgtcctcgttgaacataggaaaaaaaaatatataaacaaggctctttcactctccttggaatcagatttgggtttgttccctttattttcatatttcttgtcatattcttttctcaattattatcttctactcataacctcacgcaaaataacacagtcaaatcaaaaacaatgggtgatgttaatgataatctcctctcgtcatgtttaaactcccatggtgttcacaacttcaccacgctatcaaccgatacaaattccgactacttcaaactgctgcatgcatccatgcagaacccgttgttcgcgaagcctacggtatcgaaaccgtcgtttattgtaatgcccggcagcaaagaagaattatcgagcaccgttcattgttgtacaagagaatcatggactattcgactgcggagcggcggtcatagttatgaagggttgtcttatactgctgatacaccttttgtgattgttgatatgatgaacttgaatcgaatttccattgatgtcttgtcggaaacagcttgggttgaatctggggcaacacttggagaactctattatgcgattgcgcagtcgacggataccctggggtttactgctggttggtgtccgactgttggtagcggaggacatataagcggtggtggttttggtatgatgtcgaggaagtacggattagctgcggataatgtcgtggacgcgattcttatagatagcaatggagcgattcttgaccgtgaaaaaatgggtgacgatgttttttgggctattcgtggtggcggcggaggtgtttggggtgcaatttacgcgtggaaaatcaaactattgccagttccggagaagctgaccgtttttcgtgtgacaaagaatgtaggaatcgaagacgcttcatctttacttcacaaatggcaatatgtcgcagatgaattagacgaggattttacggtatccgtgcttgggggagtaaacggaaatgatgcctggttaatgttcttaggcttacacttgggacgtaaagatgctgcgaaaactataatcgatgaaaaattccctgaactggggttagtagataaagagtttcaagaaatgagttggggtgaatccatggctttcttatcaggattagatacaatctctgaactaaacaacaggttcttgaaatttgatgaaagagcttttaagactaaagttgattttactaaagtatcagtacccctaaacgtgtttagacatgcattagagatgttatcagaacagcccggtgggtttatagctctaaatggtttcggagggagaatgagtgaaattagcactgattttaccccgtttcctcatcggaaaggcactaaattgatgttcgaatatataatcgcttggaaccaagatgaagaatcgaaaatcggcgagtttagcgaatggttagcgaagttttacgattatttggaaccgttcgtgtcgaaagaaccaagggttggttatgttaatcatattgatcttgatattggagggatagattggagaaataaaagtagtactaccaatgctgttgagatagctagaaattggggtgaaagatatttttcatcgaattatgaacgtttggttaaggctaagacattgattgatccaaataatgtgtttaaccatccacagagtatacctccaacgatgaaatttgaggaaatttacatgttgaaggaattgtggacttcttcgccagaggtttggtcaagtctccaatcaaggttgtcggcttgtctaccttgccagaaatttacgaaaagatggaaaagggtcaaatcgttggtagatacgttgttgacacttctaaataagcgaatttcttatgatttatgatttttattattaaataagttataaaaaaaataagtgtatacaaattttaaagtgactcttaggttttaaaacgaaaattcttattcttgagtaactctttcctgtaggtcaggttgctttctcaggtatagcatgaggtcgctcttattgaccacacctctaccggcatgcggcaatcacatcaccatgagttgtccagttaataaaccgtggcaaacatgatggtggcctaatggaggtcaccagagactgcagcattactttgagaagacaggcattgctgggatcacccatacatcactctgttttgcctgaccttttccggtaatttgaaaacaaacccggtctcgaagcggagatccggcgataattaccgcagaaataaacccatacacgagacgtagaaccagccgcacatggccggagaaactcctgcgagaatttcgtaaactcgcgcgcattgcatctgtatttcctaatgcggcacttccaggcctcgagacctctgacatgcttttgacaggaatagacattttcagaatgttatccatatgcctttcgggtttttttccttccttttccatcatgaaaaatctctcgagaccgtttatccattgcttttttgttgtctttttccctcgttcacagaaagtctgaagaagctatagtagaactatgagctttttttgtttctgttttccttttttttttttttacctctgtggaaattgttactctcacactctttagttcgtttgtttgttttgtttattccaattatgaccggtgacgaaacgtggtcgatggtgggtaccgcttatgctcccctccattagtttcgattatataaaaaggccaaatattgtattattttcaaatgtcctatcattatcgtctaacatctaatttctcttaaattttttctctttctttcctataacaccaatagtgaaaatctttttttcttctatatctacaaaaactttttttttctatcaacctcgttgataaattttttctttaacaatcgttaataattaattaattggaaaataaccattttttctctcttttatacacacattcaaaagaaagaaaaaaaatataccccagctagttaaagaaaatcattgaaaagaataagaagataagaaagatttaattatcaaaatggaattatcgattactacctcaatagctctagccacaattgttttttttctatataagttggcaacacgtcctaaatccacgaagaaacaattacccgaagctagtcgtttaccaatcattggacacaagagaaagaaatcatccactatggtatggcctactgggcccaaaactctgccaattataggtaatatgcatgttttaggtggaacagcattgcaagttgtgttgcataatctggctaagatacatggcaacgttatgacaatttggattggttcgtggcgtcccgttatagtagttagcgacattgatagggcatgggaagtgttagttaacaagagctcagactactctgccagagatatgcctgaaatcaccaaaattatctcagcggattggaaaacaatctctacttccgattctggtcctggttggtccaatctaagaaaagggctacaaaatgttgctctttctccacataatcttgctgctcaaagtcaatttcaggagaaagacattactaaaatgattcagtctttgaagaaagaagctgcctctaataatgggattgttaaaccgattgatcacttgaagaaagctactcttagacttattagtagattgattttcggacaagattttgacgatgacaagtatgtcgatgatatgcatcatgctatcgaagagctgataagagtgtcaggttatgcgcaattggctgaagcattctactatgcgaaatacttgccatcacacaagaaggctgttagagatgtcgaagaagccaatcagagggtaaagaaattggttagaccgtttctttctttgaatcctccaaccaatacgtacttgcactttctgaacagtcagaaatacgatgaagaggtcattatctttgccatctttgaggcctatctattgggcgtagattccacctccttgaccaccgcatgggcattagcattccttatcagagaaccagtagtccaagacaaattatatcaagaactaaagaacttaacggctaagaatgattgcgaaattgtcaaagtggaagatttaaacaagcttcagtatttgcaagcagtactaaaagagacaatgagaatgaaacctatagcaccactagctatcccacacaaggcctgtagagatactagcttgaaaggcaacaaaatagaccagggtactcaagtaatggtcaatatatacgcattgcatcataacgaaaaggtatggaaggaaccttttaaatttatgccagaaaggttcttacaaacacaagatgtcgtgaacggtaaaggtatggagcagtcgttattgccgttctctgccggtatgagaatatgtgctggaatggaattaggtaaactgcaattcagcttctcattagccaacttggtgaatgcattcgagtggagttgtgttagtgatggagttttacctgacatgtctgaccaattaggctttgtgctgttgatgaaaacacccttacaagcgaggatagtcccaagagtttaaaacaaatcgctcttaaatatatacctaaagaacattaaagctatattataagcaaagatacgtaaattttgcttatattattatacacatatcatatttctatatttttaagatttggttatataatgtacgtaatgcaaaggaaataaattttatacattattgaacagcgtccaagtaactacattatgtgcactaatagtttagcgtcgtgaagactttattgtgtcgcgaaaagtaaaaattttaaaaattagagcaccttgaacttgcgaaaaaggttctcatcaactgtttaaaaggaggatatcaggtcctatttctgacaaacaatatacaaatttagtttcaaagatgaatcagtgcgcgaaggacataactcatgaagcctccagtataccggcaatcacatcaccatgagttgt

SEQ ID NO: 9 - DNA, 14078 bp, Artificial Sequence
  Synthetic sequence
  misc_feature (8614)..(8614): n is a, c, g, or t
gcggccgcggtacctaataacttcgtatagcatacattatacgaagttatattaagggttctcgacgttttcgacactggatggcggcgttagtatcgaatcgacagcagtatagcgaccagcattcacatacgattgacgcatgatattactttctgcgcacttaacttcgcatctgggcagatgatgtcgaggcgaaaaaaaatataaatcacgctaacatttgattaaaatagaacaactacaatataaaaaaactatacaaatgacaagttcttgaaaacaagaatctttttattgtcagtactgattagaaaaactcatcgagcatcaaatgaaactgcaatttattcatatcaggattatcaataccatatttttgaaaaagccgtttctgtaatgaaggagaaaactcaccgaggcagttccataggatggcaagatcctggtatcggtctgcgattccgactcgtccaacatcaatacaacctattaatttcccctcgtcaaaaataaggttatcaagtgagaaatcaccatgagtgacgactgaatccggtgagaatggcaaaagcttatgcatttctttccagacttgttcaacaggccagccattacgctcgtcatcaaaatcactcgcatcaaccaaaccgttattcattcgtgattgcgcctgagcgagacgaaatacgcgatcgctgttaaaaggacaattacaaacaggaatcgaatgcaaccggcgcaggaacactgccagcgcatcaacaatattttcacctgaatcaggatattcttctaatacctggaatgctgttttgccggggatcgcagtggtgagtaaccatgcatcatcaggagtacggataaaatgcttgatggtcggaagaggcataaattccgtcagccagtttagtctgaccatctcatctgtaacatcattggcaacgctacctttgccatgtttcagaaacaactctggcgcatcgggcttcccatacaatcgatagattgtcgcacctgattgcccgacattatcgcgagcccatttatacccatataaatcagcatccatgttggaatttaatcgcggcctcgaaacgtgagtcttttccttacccatggttgtttatgttcggatgtgatgtgagaactgtatcctagcaagattttaaaaggaagtatatgaaagaagaacctcagtggcaaatcctaaccttttatatttctctacaggggcgcggcgtggggacaattcaacgcgtctgtgaggggagcgtttccctgctcgcaggtctgcagcgaggagccgtaatttttgcttcgcgccgtgcggccatcaaaatgtatggatgcaaatgattatacatggggatgtatgggctaaatgtacgggcgacagtcacatcatgcccctgagctgcgcacgtcaagactgtcaaggagggtattctgggcctccatgtcgctggccgggtgacccggcggggacgaggcaagctaaacagatctctagacctaataacttcgtatagcatacattatacgaagttatattaagggttgtcttaattaagggtgcccaattcgccctatagtgagtcgtattacgcgcgctcactggccgtcgttttacaacgtcgtgactgggaaaaccctggcgttacccaacttaatcgccttgcagcacatccccctttcgccagctggcgtaatagcgaagaggcccgcaccgatcgcccttcccaacagttgcgcagcctgaatggcgaatggcgcgacgcgccctgtagcggcgcattaagcgcggcgggtgtggtggttacgcgcagcgtgaccgctacacttgccagcgccctagcgcccgctcctttcgctttcttcccttcctttctcgccacgttcgccggctttccccgtcaagctctaaatcgggggctccctttagggttccgatttagtgctttacggcacctcgaccccaaaaaacttgattagggtgatggttcacgtagtgggccatcgccctgatagacggtttttcgccctttgacgttggagtccacgttctttaatagtggactcttgttccaaactggaacaacactcaaccctatctcggtctattcttttgatttataagggattttgccgatttcggcctattggttaaaaaatgagctgatttaacaaaaatttaacgcgaattttaacaaaatattaacgtttacaatttcctgatgcggtattttctccttacgcatctgtgcggtatttcacaccgcatagggtaataactgatataattaaattgaagctctaatttgtgagtttagtatacatgcatttacttataatacagttttttagttttgctggccgcatcttctcaaatatgcttcccagcctgcttttctgtaacgttcaccctctaccttagcatcccttccctttgcaaatagtcctcttccaacaataataatgtcagatcctgtagagaccacatcatccacggttctatactgttgacccaatgcgtctcccttgtcatctaaacccacaccgggtgtcataatcaaccaatcgtaaccttcatctcttccacccatgtctctttgagcaataaagccgataacaaaatctttgtcgctcttcgcaatgtcaacagtacccttagtatattctccagtagatagggagcccttgcatgacaattctgctaacatcaaaaggcctctaggttcctttgttacttcttctgccgcctgcttcaaaccgctaacaatacctgggcccaccacaccgtgtgcattcgtaatgtctgcccattctgctattctgtatacacccgcagagtactgcaatttgactgtattaccaatgtcagcaaattttctgtcttcgaagagtaaaaaattgtacttggcggataatgcctttagcggcttaactgtgccctccatggaaaaatcagtcaagatatccacatgtgtttttagtaaacaaattttgggacctaatgcttcaactaactccagtaattccttggtggtacgaacatccaatgaagcacacaagtttgtttgcttttcgtgcatgatattaaatagcttggcagcaacaggactaggatgagtagcagcacgttccttatatgtagctttcgacatgatttatcttcgtttcctgcaggtttttgttctgtgcagttgggttaagaatactgggcaatttcatgtttcttcaacactacatatgcgtatatataccaatctaagtctgtgctccttccttcgttcttccttctgttcggagattaccgaatcaaaaaaatttcaaagaaaccgaaatcaaaaaaaagaataaaaaaaaaatgatgaattgaattgaaaagctgtggtatggtgcactctcagtacaatctgctctgatgccgcatagttaagccagccccgacacccgccaacacccgctgacgcgccctgacgggcttgtctgctcccggcatccgcttacagacaagctgtgaccgtctccgggagctgcatgtgtcagaggttttcaccgtcatcaccgaaacgcgcgagacgaaagggcctcgtgatacgcctatttttataggttaatgtcatgataataatggtttcttaggacggatcgcttgcctgtaacttacacgcgcctcgtatcttttaatgatggaataatttgggaatttactctgtgtttatttatttttatgttttgtatttggattttagaaagtaaataaagaaggtagaagagttacggaatgaagaaaaaaaaataaacaaaggtttaaaaaatttcaacaaaaagcgtactttacatatatatttattagacaagaaaagcagattaaatagatatacattcgattaacgataagtaaaatgtaaaatcacaggattttcgtgtgtggtcttctacacagacaagatgaaacaattcggcattaatacctgagagcaggaagagcaagataaaaggtagtatttgttggcgatccccctagagtcttttacatcttcggaaaacaaaaactattttttctttaatttctttttttactttctatttttaatttatatatttatattaaaaaatttaaattataattatttttatagcacgtgatgaaaaggacccaggtggcacttttcggggaaatgtgcgcggaacccctatttgtttatttttctaaatacattcaaatatgtatccgctcatgagacaataaccctgataaatgcttcaataatattgaaaaaggaagagtatgagtattcaacatttccgtgtcgcccttattcccttttttgcggcattttgccttcctgtttttgctcacccagaaacgctggtgaaagtaaaagatgctgaagatcagttgggtgcacgagtgggttacatcgaactggatctcaacagcggtaagatccttgagagttttcgccccgaagaacgttttccaatgatgagcacttttaaagttctgctatgtggcgcggtattatcccgtattgacgccgggcaagagcaactcggtcgccgcatacactattctcagaatgacttggttgagtactcaccagtcacagaaaagcatcttacggatggcatgacagtaagagaattatgcagtgctgccataaccatgagtgataacactgcggccaacttacttctgacaacgatcggaggaccgaaggagctaaccgcttttttgcacaacatgggggatcatgtaactcgccttgatcgttgggaaccggagctgaatgaagccataccaaacgacgagcgtgacaccacgatgcctgtagcaatggcaacaacgttgcgcaaactattaactggcgaactacttactctagcttcccggcaacaattaatagactggatggaggcggataaagttgcaggaccacttctgcgctcggcccttccggctggctggtttattgctgataaatctggagccggtgagcgtgggtctcgcggtatcattgcagcactggggccagatggtaagccctcccgtatcgtagttatctacacgacggggagtcaggcaactatggatgaacgaaatagacagatcgctgagataggtgcctcactgattaagcattggtaactgtcagaccaagtttactcatatatactttagattgatttaaaacttcatttttaatttaaaaggatctaggtgaagatcctttttgataatctcatgaccaaaatcccttaacgtgagttttcgttccactgagcgtcagaccccgtagaaaagatcaaaggatcttcttgagatcctttttttctgcgcgtaatctgctgcttgcaaacaaaaaaaccaccgctaccagcggtggtttgtttgccggatcaagagctaccaactctttttccgaaggtaactggcttcagcagagcgcagataccaaatactgtccttctagtgtagccgtagttaggccaccacttcaagaactctgtagcaccgcctacatacctcgctctgctaatcctgttaccagtggctgctgccagtggcgataagtcgtgtcttaccgggttggactcaagacgatagttaccggataaggcgcagcggtcgggctgaacggggggttcgtgcacacagcccagcttggagcgaacgacctacaccgaactgagatacctacagcgtgagctatgagaaagcgccacgcttcccgaagggagaaaggcggacaggtatccggtaagcggcagggtcggaacaggagagcgcacgagggagcttccagggggaaacgcctggtatctttatagtcctgtcgggtttcgccacctctgacttgagcgtcgatttttgtgatgctcgtcaggggggcggagcctatggaaaaacgccagcaacgcggcctttttacggttcctggccttttgctggccttttgctcacatgttctttcctgcgttatcccctgattctgtggataaccgtattaccgcctttgagtgagctgataccgctcgccgcagccgaacgaccgagcgcagcgagtcagtgagcgaggaagcggaagagcgcccaatacgcaaaccgcctctccccgcgcgttggccgattcattaatgcagctggcacgacaggtttcccgactggaaagcgggcagtgagcgcaacgcaattaatgtgagttacctcactcattaggcaccccaggctttacactttatgcttccggctcctatgttgtgtggaattgtgagcggataacaatttcacacaggaaacagctatgaccatgattacgccaagcgcgcaattaaccctcactaaagggaacaaaagctggagctcgtttaaacggcgcgccgagactgcagcattactttgagaagacatgcgactgggtgagcatatgttccgctgatgtgatgtgcaagataaacaagcaagacagaaactaacttcttcttcatgtaataaacacaccccgcgtttatttacctatctttaaacttcaacaccttatatcataactaatatttcttgagataagcacactgcacccataccttccttaaaaacgtagcttccagtttttggtggttctggcttccttcccgattccgcccgctaaacgcataattttgttgcctggtggcatttgcaaaatgcataacctatgcatttaaaagattatgtatgctcttctgacttttcgtgtgatgaggctcgtggaaaaaatgaataatttatgaatttgagaacaattttgtgttgttacggtattttactatggaataatcaatcaattgaggattttatgcaaatatcgtttgaatatttttccgaccctttgagtacttttcttcataattgcataatattgtccgctgcccgtttttctgttagacggtgtcttgatctacttgctatcgttcaacaccaccttattttctaactattttttttttagctcatttgaatcagcttatggtgatggcacatttttgcataaacctagctgtcctcgttgaacataggaaaaaaaaatatataaacaaggctctttcactctccttggaatcagatttgggtttgttccctttattttcatatttcttgtcatattcttttctcaattattatcttctactcataacctcacgcaaaataacacagtcaaatcaaaaacaatggattccttaatgcttgcttatttgtttccaatttcagttgcttctattattgcttttgttttcctctacaatctcttttcttcaagaactcttaaaaataagaagattaggacagcacccatggcaacaggtgcttggcctgttcttggtcatctccatctctttggttctggtgaattgcctcataaaatgttagctgccatggctgacaagtatggctcagccttcaggatgaagttcggtaaacacacaacactagttgtgagtgatacccgtatcgttaaagaatgtttcactaccaacgataccctcttctctaaccgtccttccactaaagcttttcaactcatgacttacgataatgagtcggttgcctttacaccttacggttcttactggcgcgagattagaaagatatccactcttaaacttctatccaaccatcgtctccaagccatcaaggacgtaagagcctcggaggtaaacgtctgcttcaaaaccttatacgaccagtgtaagaatccaagtggatcagctcctattttgatcgatatgaagaaatggttcgaagaggtctcgaacaacgtggtgatgagggtaattgtggggagacaaaactttgggtctaagattgtgcaaggtgaggaggaagctatccattacaagaaggtcatggatgagctcttacgtctcgctagcttgtctatgttctcggattttgctcctttacttggtttcgtggacatctttcaaggaaacttgagtgccatgaaacgaaacgccaagaaggtagatgcaatcctggagaactggttggaagagcatcgcaagaagaagaactcagttgctgaaagccagcaagatttcatggatgttatgttgtcgattgttgaggagagcaagttgtctggtcacgatgctgatgccgtaattaaagctacttgtctagccatgatcatgggcggaacagataccacagcagtgagtctaacatggatcatttctttattaatgaataatcgtcacgctttgaagaaagctcgagaagagttagatgcactagtaggaaaggacagacaagttgaagattcggatttgaagaatttagtttacatgaatgctattgttaaggaaacaatgagaatgtacccattaggtactcttctcgaacgtgagactaaggaggattgtgagatcgacgggtttcatgtcaaaggtgggactaggttgctagtgaatgtgtggaagttgcaacgagacccaaatgtatgggttgatccaacagaatttagacccgaaagatttctaacggagaatgcagatatagatgttggaggtcagcattttgagttgctaccatttggagcaggacgaagggtgtgccctggggtgncgtttgcactacaattcatgcatttagtacttgctcgcctcatccatggatacgatttgaatactctaaacgaagaaaatgtggatctgacggagagcccagaaggacatgtgaaccacaaagcatcgcctcttgatctcatcctcacccctcgtctacattacaagttgtacgaatagtcatgtaattagttatgtcacgcttacattcacgccctccccccacatccgctctaaccgaaaaggaaggagttagacaacctgaagtctaggtccctatttatttttttttatagttatgttagtattaagaacgttatttatatttcaaatttttcttttttttctgtacaaacgcgtgtacgcatgtaacattatactgaaaaccttgcttgagaaggttttgggacgctcgaaggctttaatttgcggcaatcacatcaccatgagttgtctcatggcgggggtcggaatgattaaagaaaggggctgtgggcgagattggagactgcagcattactttgagaagtcgagtttatcattatcaatactgccatttcaaagaatacgtaaataattaatagtagtgattttcctaactttatttagtcaaaaaattagccttttaattctgctgtaacccgtacatgcccaaaatagggggcgggttacacagaatatataacatcgtaggtgtctgggtgaacagtttattcctggcatccactaaatataatggagcccgctttttaagctggcatccagaaaaaaaaagaatcccagcaccaaaatattgttttcttcaccaaccatcagttcataggtccattctcttagcgcaactacagagaacaggggcacaaacaggcaaaaaacgggcacaacctcaatggagtgatgcaacctgcctggagtaaatgatgacacaaggcaattgacccacgcatgtatctatctcattttcttacaccttctattaccttctgctctctctgatttggaaaaagctgaaaaaaaaggttgaaaccagttccctgaaattattcccctacttgactaataagtatataaagacggtaggtattgattgtaattctgtaaatctatttcttaaacttcttaaattctacttttatagttagtcttttttttagttttaaaacaccaagaacttagtttcgaaaaacaatgcgaaccgaatcaatcaaaacaaacagaccgatggatctacttctccagtacttgcaaccgatttccgttgcacttgttgtgattgcactggtttggaactatggaagaagaaaccccaccaaaaaactagcacctgaagcctcaggagggagacctataatgggtcacttgcatcttttcaacgacggtgagttaactcatcggaaactcggtgcaatggcggatacttatggtcctgttttcaatatccgattcggttcgcataaaacactagttgttagtgattgggaaattgttaaagaatgttttacgacgaatgacaagctcttctcgaatcggccgggtacgttaggtattaaactcatgttttacgacgccgattccgttggttatgcgccgtatggtgcttactggagagatttacgaaagatttctaccttaaaacttctctcgaatcatcgtatcgatacgataaaacatctgaggagttctgaagttgagtcgtgtttcgagtcgctttatagtcagtggggaaacggggaaaagagtggcgaattcgctccggtgagaatggatagttggttaggcgatttgacgtttaatgttgttgccagaattgttgcgggtaagaagaatttctcggccaacggtgacgttggggctcagagatataaagcagcaatggatgaagctatgagattaatgagatttttcgcattttcggatgtaattccctcgctaagctggttagacaatctaagaggtttggtgcgagatatgaaaaaatgtgcatctgaaattgattcaattatggctacttgggttgaagaacatcgcgtgaaaagaaattcaggaggtgattctcaactcgaacatgattttattgatgtttgcttggatattatggagcattcttcgttacccggcgatgatcctgacctcgtcgtcaaatctacgtgtctggacatgatattgggtgggagtgacacgacgacagttaccctaacatgggctatgtctttactcttgaaccatccccaagtactgcaaaaagcaaaagaagaactagagacacaagtaggaaagaaccggcaagtcgacgactcggacatcccgaatctcccattcatccaagcgatcatcaaagagacgatgaggctgtacccggctggaccattgatcgagcggaggacgatggaggactgcgaagtagccgggtaccaagttccagccggcacgcgcttattggttaacgtctggaagatgcaaagagatgggaacgtatacaaaggcgatccgttggagtttagacccgacaggtttttaactagcaatgcggatgtggatctaaagggtcagcattatgaattgataccatttggagctggtagaaggatatgcccgggagtatcgtttgcggttcaattgatgcatttggttcttgctcgattacttcatgaattcgaaatcacgactgtggagccagaaaccaaggtggatatggctgaaagtggtggtttgctttgttataagataatgccattggaagtactgatcaaacctcgactcgagatatgatggacttcttcgccagaggtttggtcaagtctccaatcaaggttgtcggcttgtctaccttgccagaaatttacgaaaagatggaaaagggtcaaatcgttggtagatacgttgttgacacttctaaataagcgaatttcttatgatttatgatttttattattaaataagttataaaaaaaataagtgtatacaaattttaaagtgactcttaggttttaaaacgaaaattcttattcttgagtaactctttcctgtaggtcaggttgctttctcaggtatagcatgaggtcgctcttattgaccacacctctaccggcatgcggcaatcacatcaccatgagttgtgagactgcagcattactttgagaagatccaactggcaccgctggcttgaacaacaataccagccttccaacttctgtaaataacggcggtacgccagtgccaccagtaccgttacctttcggtatacctcctttccccatgtttccaatgcccttcatgcctccaacggctactatcacaaatcctcatcaagctgacgcaagccctaagaaatgaataacaatactgacagtactaaataattgcctacttggcttcacatacgttgcatacgtcgatatagataataatgataatgacagcaggattatcgtaatacgtaatagttgaaaatctcaaaaatgtgtgggtcattacgtaaataatgataggaatgggattcttctatttttcctttttccattctagcagccgtcgggaaaacgtggcatcctctctttcgggctcaattggagtcacgctgccgtgagcatcctctctttccatatctaacaactgagcacgtaaccaatggaaaagcatgagcttagcgttgctccaaaaaagtattggatggttaataccatttgtctgttctcttctgactttgactcctcaaaaaaaaaaaatctacaatcaacagatcgcttcaattacgccctcacaaaaacttttttccttcttcttcgcccacgttaaattttatccctcatgttgtctaacggatttctgcacttgatttattataaaaagacaaagacataatacttctctatcaatttcagttattgttcttccttgcgttattcttctgttcttctttttcttttgtcatatataaccataaccaagtaatacataaaaacaatgggttcaatagatgaggtcaagaaggaatcagcaggggaaacactagggagattgttgaaaggagagattaaagatgaggaactgaagaagctgattaagtttcaattcgagaaacgtctgcaatggggttataaatcatctcatcaagaacaactctccttcaaccttgacttcattaaatccttaaaaaagatggaaatgtcaggagagattgagacaatgaacaaggaaacctatgaattaccctcagaattcttagaggcagtttttgggaaaactgtcaagcaaagtatgtgttacttcacacatgaatcagcaacaatagacgaagcagaagaagctgcacatgaattatactgtgaacgagcacaaatcaaagacggacaaactgttcttgacattggttgtggtcaaggtggtctagttctatacattgctcagaaatataagaactgccatgttacagggctcactaattcaaaggcacaagtcaattacttactcaagcaagcagagaagcttgggttgacaaacgtcgacgccatactagcagatgttactcagtatgaatctgacaagacatacgatcgtctacttatgattgaagccatagagcatatgaaaaacttacagctgttcatgaagaaactatcaacttggatgacaaaagaaagtcttctctttgtggaccacgtctgccacaaaacatttgctcacttttttgaggcagtcgatgaggatgactggtactcaggtttcattttccccccaggttgtgcaaccatactagctgctaatagtctcctctatttccaggatgatgtttcagttgtggatcattgggttgtcaatggaatgcacatggctcgttcagtagacatttggagaaaggcgctagacaaaaatatggaagctgcaaaagaaattctattacctggacttggaggaagccacgaaacagtgaatggagtcgttactcacattagaacattctgtatgggaggctatgaacaattctcaatgaacaatggagatgagtggatggttgcgcagctgcttttcaagaagaagtagaacaaatcgctcttaaatatatacctaaagaacattaaagctatattataagcaaagatacgtaaattttgcttatattattatacacatatcatatttctatatttttaagatttggttatataatgtacgtaatgcaaaggaaataaattttatacattattgaacagcgtccaagtaactacattatgtgcactaatagtttagcgtcgtgaagactttattgtgtcgcgaaaagtaaaaattttaaaaattagagcaccttgaacttgcgaaaaaggttctcatcaactgtttaaaaggaggatatcaggtcctatttctgacaaacaatatacaaatttagtttcaaagatgaatcagtgcgcgaaggacataactcatgaagcctccagtataccggcaatcacatcaccatgagttgt

SEQ ID NO: 10 - DNA, 3010 bp, Artificial Sequence
  Synthetic sequence
gagactgcagcattactttgagaagtcgagtttatcattatcaatactgccatttcaaagaatacgtaaataattaatagtagtgattttcctaactttatttagtcaaaaaattagccttttaattctgctgtaacccgtacatgcccaaaatagggggcgggttacacagaatatataacatcgtaggtgtctgggtgaacagtttattcctggcatccactaaatataatggagcccgctttttaagctggcatccagaaaaaaaaagaatcccagcaccaaaatattgttttcttcaccaaccatcagttcataggtccattctcttagcgcaactacagagaacaggggcacaaacaggcaaaaaacgggcacaacctcaatggagtgatgcaacctgcctggagtaaatgatgacacaaggcaattgacccacgcatgtatctatctcattttcttacaccttctattaccttctgctctctctgatttggaaaaagctgaaaaaaaaggttgaaaccagttccctgaaattattcccctacttgactaataagtatataaagacggtaggtattgattgtaattctgtaaatctatttcttaaacttcttaaattctacttttatagttagtcttttttttagttttaaaacaccaagaacttagtttcgaaaaacaatggggtcaaacaacctggcaaactctatcgagtctatgcttgggatatctattggaagtgaatacatttcagatcctatctttatcatggtaaccaccgtggcttctatgctaataggctttgggtttttcgcatgcatgaaaagttcctcatcacaatcaaaacctattgaaacatacaaacctatcattgataaggaggaagaggaaatcgaagtcgaccctgggaagataaagctcacaatctttttcgggacacaaacaggaacagctgaaggattcgcaaaggccttggctgaagagatcaaagctaagtacaaaaaggccgtggttaaggtggttgaccttgatgattatgccgcggaggatgatcagtacgaggaaaaactcaaaaaggaaagtctcgtgtttttcatggttgctacttatggggacggagaaccaacggataatgccgcaagattctacaagtggtttactcaagagcacgaaagaggtgaatggttacaacagctgacttatggtgtattcggcttgggtaatagacaatacgaacatttcaataagattgcagtagacgttgatgaacaattaggaaagcaaggcgcaaagagaatagttcaagtaggtttaggtgacgatgatcaatgtatcgaagatgatttcacagcatggagagaactcttatggactgaactagaccagcttctcaaggacgaagatgccgctccttctgtcgctactccatacattgcaacagtaccagagtacagagtcgttattcatgaaaccactgttgcggctctagatgataagcatatcaacacagccaacggagatgttgcgttcgatattctgcatccatgtagaacgattgttgcacaacagagagaacttcataagccaaagtccgaccgaagctgcattcacttggaatttgatatctctggttcctccttgacatacgaaactggtgatcatgtaggagtttacgcggaaaactgtgacgagactgtcgaggaagcaggaaagttattgggccagccacttgatttgttattctctatccacacggataaagaggacggttctccacaaggttcatctttacctcctccattccctggtccatgtactttacgtagtgctctagcaagatacgcagacttattgaatccaccacgtaaggcctctctaatagctctttctgctcatgcctctgttccatcagaggctgaaagactaaggtttttgtcatctccattgggcaaaaacgaatactcaaaatgggtagtaggctctcaaagatcattgttagagattatggctgaatttccatctgctaagcctcctttgggtgtgtttttcgctgctgttgcacctcgactaccaccaagatactatagcatttctagttctccaaagtttgctccatccagaatacatgttacatgcgccctggtatatggtcaatcaccaactggtagagtccacaggggagtctgcagcacgtggatgaagcacgccgttcctcaagatagttgggctcctatcttcgttagaacttccaatttcaagttaccagccgacccaagtaccccaatcatcatggtgggaccaggtacaggcctagctccatttcgaggcttcctccaagagagaatggctttgaaagagaacggtgcgcaacttggccctgccgttttgtttttcggatgtaggaacagaaacatggatttcatatacgaagatgaacttaacaatttcgtcgaacgtggtgtcatttctgagctagtaatcgccttctcaagagagggtgagaaaaaggaatatgtgcaacacaagatgatggaaaaagctaccgatgtttggaatgttatctctggggatggttatctgtacgtctgtggcgatgcaaagggcatggctagagatgtccatagaacactgcacacaattgctcaagagcaaggtccaatggaatcatccgccgcagaagcagcagtcaaaaagttacaagttgaagagagatacttgagagatgtatggtaatcatgtaattagttatgtcacgcttacattcacgccctccccccacatccgctctaaccgaaaaggaaggagttagacaacctgaagtctaggtccctatttattttttttaatagttatgttagtattaagaacgttatttatatttcaaatttttcttttttttctgtacaaacgcgtgtacgcatgtaacattatactgaaaaccttgcttgagaaggttttgggacgctcgaaggctttaatttgcggcaatcacatcaccatgagttgt

SEQ ID NO: 11 - DNA, 2996 bp, Artificial Sequence
  Synthetic sequence
gagactgcagcattactttgagaagacaggcattgctgggatcacccatacatcactctgttttgcctgaccttttccggtaatttgaaaacaaacccggtctcgaagcggagatccggcgataattaccgcagaaataaacccatacacgagacgtagaaccagccgcacatggccggagaaactcctgcgagaatttcgtaaactcgcgcgcattgcatctgtatttcctaatgcggcacttccaggcctcgagacctctgacatgcttttgacaggaatagacattttcagaatgttatccatatgcctttcgggtttttttccttccttttccatcatgaaaaatctctcgagaccgtttatccattgcttttttgttgtctttttccctcgttcacagaaagtctgaagaagctatagtagaactatgagctttttttgtttctgttttccttttttttttttttacctctgtggaaattgttactctcacactctttagttcgtttgtttgttttgtttattccaattatgaccggtgacgaaacgtggtcgatggtgggtaccgcttatgctcccctccattagtttcgattatataaaaaggccaaatattgtattattttcaaatgtcctatcattatcgtctaacatctaatttctcttaaattttttctctttctttcctataacaccaatagtgaaaatctttttttcttctatatctacaaaaactttttttttctatcaacctcgttgataaattttttctttaacaatcgttaataattaattaattggaaaataaccattttttctctcttttatacacacattcaaaagaaagaaaaaaaatataccccagctagttaaagaaaatcattgaaaagaataagaagataagaaagatttaattatcaaaaaaacaatgggtgatgttaatgataatctcctctcgtcatgtttaaactcccatggtgttcacaacttcaccacgctatcaaccgatacaaattccgactacttcaaactgctgcatgcatccatgcagaacccgttgttcgcgaagcctacggtatcgaaaccgtcgtttattgtaatgcccggcagcaaagaagaattatcgagcaccgttcattgttgtacaagagaatcatggactattcgactgcggagcggcggtcatagttatgaagggttgtcttatactgctgatacaccttttgtgattgttgatatgatgaacttgaatcgaatttccattgatgtcttgtcggaaacagcttgggttgaatctggggcaacacttggagaactctattatgcgattgcgcagtcgacggataccctggggtttactgctggttggtgtccgactgttggtagcggaggacatataagcggtggtggttttggtatgatgtcgaggaagtacggattagctgcggataatgtcgtggacgcgattcttatagatagcaatggagcgattcttgaccgtgaaaaaatgggtgacgatgttttttgggctattcgtggtggcggcggaggtgtttggggtgcaatttacgcgtggaaaatcaaactattgccagttccggagaagctgaccgtttttcgtgtgacaaagaatgtaggaatcgaagacgcttcatctttacttcacaaatggcaatatgtcgcagatgaattagacgaggattttacggtatccgtgcttgggggagtaaacggaaatgatgcctggttaatgttcttaggcttacacttgggacgtaaagatgctgcgaaaactataatcgatgaaaaattccctgaactggggttagtagataaagagtttcaagaaatgagttggggtgaatccatggctttcttatcaggattagatacaatctctgaactaaacaacaggttcttgaaatttgatgaaagagcttttaagactaaagttgattttactaaagtatcagtacccctaaacgtgtttagacatgcattagagatgttatcagaacagcccggtgggtttatagctctaaatggtttcggagggagaatgagtgaaattagcactgattttaccccgtttcctcatcggaaaggcactaaattgatgttcgaatatataatcgcttggaaccaagatgaagaatcgaaaatcggcgagtttagcgaatggttagcgaagttttacgattatttggaaccgttcgtgtcgaaagaaccaagggttggttatgttaatcatattgatcttgatattggagggatagattggagaaataaaagtagtactaccaatgctgttgagatagctagaaattggggtgaaagatatttttcatcgaattatgaacgtttggttaaggctaagacattgattgatccaaataatgtgtttaaccatccacagagtatacctccaacgatgaaatttgaggaaatttacatgttgaaggaattgtagaacaaatcgctcttaaatatatacctaaagaacattaaagctatattataagcaaagatacgtaaattttgcttatattattatacacatatcatatttctatatttttaagatttggttatataatgtacgtaatgcaaaggaaataaattttatacattattgaacagcgtccaagtaactacattatgtgcactaatagtttagcgtcgtgaagactttattgtgtcgcgaaaagtaaaaattttaaaaattagagcaccttgaacttgcgaaaaaggttctcatcaactgtttaaaaggaggatatcaggtcctatttctgacaaacaatatacaaatttagtttcaaagatgaatcagtgcgcgaaggacataactcatgaagcctccagtataccggcaatcacatcaccatgagttgtgcggccgcggtacctaataacttcgtatagcatacattatacgaagttatattaagggttctcgacgttttcgacactggatggcggcgttagtatcg

SEQ ID NO: 12 - DNA, 653 bp, Artificial Sequence
  Synthetic sequence
tcgagtttatcattatcaatactgccatttcaaagaatacgtaaataattaatagtagtgattttcctaactttatttagtcaaaaaattagccttttaattctgctgtaacccgtacatgcccaaaatagggggcgggttacacagaatatataacatcgtaggtgtctgggtgaacagtttattcctggcatccactaaatataatggagcccgctttttaagctggcatccagaaaaaaaaagaatcccagcaccaaaatattgttttcttcaccaaccatcagttcataggtccattctcttagcgcaactacagagaacaggggcacaaacaggcaaaaaacgggcacaacctcaatggagtgatgcaacctgcctggagtaaatgatgacacaaggcaattgacccacgcatgtatctatctcattttcttacaccttctattaccttctgctctctctgatttggaaaaagctgaaaaaaaaggttgaaaccagttccctgaaattattcccctacttgactaataagtatataaagacggtaggtattgattgtaattctgtaaatctatttcttaaacttcttaaattctacttttatagttagtcttttttttagttttaaaacaccaagaacttagtttcga

SEQ ID NO: 13 - DNA, 815 bp, Artificial Sequence
  Synthetic sequence
atccaactggcaccgctggcttgaacaacaataccagccttccaacttctgtaaataacggcggtacgccagtgccaccagtaccgttacctttcggtatacctcctttccccatgtttccaatgcccttcatgcctccaacggctactatcacaaatcctcatcaagctgacgcaagccctaagaaatgaataacaatactgacagtactaaataattgcctacttggcttcacatacgttgcatacgtcgatatagataataatgataatgacagcaggattatcgtaatacgtaatagttgaaaatctcaaaaatgtgtgggtcattacgtaaataatgataggaatgggattcttctatttttcctttttccattctagcagccgtcgggaaaacgtggcatcctctctttcgggctcaattggagtcacgctgccgtgagcatcctctctttccatatctaacaactgagcacgtaaccaatggaaaagcatgagcttagcgttgctccaaaaaagtattggatggttaataccatttgtctgttctcttctgactttgactcctcaaaaaaaaaaaatctacaatcaacagatcgcttcaattacgccctcacaaaaacttttttccttcttcttcgcccacgttaaattttatccctcatgttgtctaacggatttctgcacttgatttattataaaaagacaaagacataatacttctctatcaatttcagttattgttcttccttgcgttattcttctgttcttctttttcttttgtcatatataaccataaccaagtaatacata

SEQ ID NO: 14 - DNA, 795 bp, Artificial Sequence
  Synthetic sequence
acatgcgactgggtgagcatatgttccgctgatgtgatgtgcaagataaacaagcaagacagaaactaacttcttcttcatgtaataaacacaccccgcgtttatttacctatctttaaacttcaacaccttatatcataactaatatttcttgagataagcacactgcacccataccttccttaaaaacgtagcttccagtttttggtggttctggcttccttcccgattccgcccgctaaacgcataattttgttgcctggtggcatttgcaaaatgcataacctatgcatttaaaagattatgtatgctcttctgacttttcgtgtgatgaggctcgtggaaaaaatgaataatttatgaatttgagaacaattttgtgttgttacggtattttactatggaataatcaatcaattgaggattttatgcaaatatcgtttgaatatttttccgaccctttgagtacttttcttcataattgcataatattgtccgctgcccgtttttctgttagacggtgtcttgatctacttgctatcgttcaacaccaccttattttctaactattttttttttagctcatttgaatcagcttatggtgatggcacatttttgcataaacctagctgtcctcgttgaacataggaaaaaaaaatatataaacaaggctctttcactctccttggaatcagatttgggtttgttccctttattttcatatttcttgtcatattcttttctcaattattatcttctactcataacctcacgcaaaataacacagtcaaatca

SEQ ID NO: 15 - DNA, 900 bp, Artificial Sequence
  Synthetic sequence
acaggcattgctgggatcacccatacatcactctgttttgcctgaccttttccggtaatttgaaaacaaacccggtctcgaagcggagatccggcgataattaccgcagaaataaacccatacacgagacgtagaaccagccgcacatggccggagaaactcctgcgagaatttcgtaaactcgcgcgcattgcatctgtatttcctaatgcggcacttccaggcctcgagacctctgacatgcttttgacaggaatagacattttcagaatgttatccatatgcctttcgggtttttttccttccttttccatcatgaaaaatctctcgagaccgtttatccattgcttttttgttgtctttttccctcgttcacagaaagtctgaagaagctatagtagaactatgagctttttttgtttctgttttccttttttttttttttacctctgtggaaattgttactctcacactctttagttcgtttgtttgttttgtttattccaattatgaccggtgacgaaacgtggtcgatggtgggtaccgcttatgctcccctccattagtttcgattatataaaaaggccaaatattgtattattttcaaatgtcctatcattatcgtctaacatctaatttctcttaaattttttctctttctttcctataacaccaatagtgaaaatctttttttcttctatatctacaaaaactttttttttctatcaacctcgttgataaattttttctttaacaatcgttaataattaattaattggaaaataaccattttttctctcttttatacacacattcaaaagaaagaaaaaaaatataccccagctagttaaagaaaatcattgaaaagaataagaagataagaaagatttaattatcaaa

SEQ ID NO: 16 - DNA, 443 bp, Artificial Sequence
  Synthetic sequence
acggattagaagccgccgagcgggtgacagccctccgaaggaagactctcctccgtgcgtcctcgtcttcaccggtcgcgttcctgaaacgcagatgtgcctcgcgccgcactgctccgaacaataaagattctacaatactagcttttatggttatgaagaggaaaaattggcagtaacctggccccacaaaccttcaaatgaacgaatcaaattaacaaccataggatgataatgcgattagttttttagccttatttctggggtaattaatcagcgaagcgatgatttttgatctattaacagatatataaatgcaaaaactgcataaccactttaactaatactttcaacattttcggtttgtattacttcttattcaaatgtaataaaagtatcaacaaaaaattgttaatatacctctatactttaacgtcaaggag

SEQ ID NO: 17 - DNA, 353 bp, Artificial Sequence
  Synthetic sequence
tattgttcggagcagtgcggcgcgaggcacatctgcgtttcaggaacgcgaccggtgaagacgaggacgcacggaggagagtcttccttcggagggctgtcacccgctcggcggcttctaatccgtacttcaatatagcaatgagcagttaagcgtattactgaaagttccaaagagaaggtttttttaggctaagataatggggctctttacatttccacaacatataagtaagattagatatggatatgtatatggatatgtatatggtggtaatgccatgtaatatgattattaaacttctttgcgtccatccaaaaaaaaagtaagaatttttgaaaattcgaattcaa

SEQ ID NO: 18 - DNA, 406 bp, Artificial Sequence
  Synthetic sequence
atagcttcaaaatgtttctactccttttttactcttccagattttctcggactccgcgcatcgccgtaccacttcaaaacacccaagcacagcatactaaatttcccctctttcttcctctagggtgtcgttaattacccgtactaaaggtttggaaaagaaaaaagagaccgcctcgtttctttttcttcgtcgaaaaaggcaataaaaatttttatcacgtttctttttcttgaaaatttttttttttgatttttttctctttcgatgacctcccattgatatttaagttaataaacggtcttcaatttctcaagtttcagtttcatttttcttgttctattacaactttttttacttcttgctcattagaaagaaagcatagcaatctaatctaagttttaat

SEQ ID NO: 19 - DNA, 559 bp, Artificial Sequence
  Synthetic sequence
tatatggggccgtatacttacatatagtagatgtcaagcgtaggcgcttcccctgccggctgtgagggcgccataaccaaggtatctatagaccgccaatcagcaaactacctccgtacattcatgttgcacccacacatttatacacccagaccgcgacaaattacccataaggttgtttgtgacggcgtcgtacaagagaacgtgggaactttttaggctcaccaaaaaagaaagaaaaaatacgagttgctgacagaagcctcaagaaaaaaaaaattcttcttcgactatgctggaggcagagatgatcgagccggtagttaactatatatagctaaattggttccatcaccttcttttctggtgtcgctccttctagtgctatttctggcttttcctatttttttttttccatttttctttctctctttctaatatataaattctcttgcattttctatttttctctctatctattctacttgtttattcccttcaaggtttttttttaaggagtacttgtttttagaatatacggtcaacgaactataattaa

SEQ ID NO: 20 - DNA, 744 bp, Artificial Sequence
  Synthetic sequence
acgcacagatattataacatctgcataataggcatttgcaagaattactcgtgagtaaggaaagagtgaggaactatcgcatacctgcatttaaagatgccgatttgggcgcgaatcctttattttggcttcaccctcatactattatcagggccagaaaaaggaagtgtttccctccttcttgaattgatgttaccctcataaagcacgtggcctcttatcgagaaagaaattaccgtcgctcgtgatttgtttgcaaaaagaacaaaactgaaaaaacccagacacgctcgacttcctgtcttcctattgattgcagcttccaatttcgtcacacaacaaggtcctagcgacggctcacaggttttgtaacaagcaatcgaaggttctggaatggcgggaaagggtttagtaccacatgctatgatgcccactgtgatctccagagcaaagttcgttcgatcgtactgttactctctctctttcaaacagaattgtccgaatcgtgtgacaacaacagcctgttctcacacactcttttcttctaaccaagggggtggtttagtttagtagaacctcgtgaaacttacatttacatatatataaacttgcataaattggtcaatgcaagaaatacatatttggtcttttctaattcgtagtttttcaagttcttagatgctttctttttctcttttttacagatcatcaaggaagtaattatctactttttacaacaaatat

SEQ ID NO: 21 - DNA, 994 bp, Artificial Sequence
  Synthetic sequence
aatgctagtattttggagattaatctcagtacaaaacaatattaaaaagaggtgaattatttttccccccttattttttttttgttagaattgatccaaatgtaaataaacaatcacaacgaaaaaaaaaaaaaaaaaaaaaatagccgccatgacctcggatcgtcggttgtgatacggtcagggtagcgccctggtcaaacttcagaactaagaaaataacaaggaagaaaaaaatagctaatttttccggcagaaagattttcgctacccgaaagtttttccggcaagctaaatggaaaaaggaaagattattgaaagagaaagaaagaaaaaaaaaaaatgtacacccagacatcgggcttccacaatttcggctctattgttttccatctctcgcaacggcgggattcctctatggcgtgtgatgtctgtatctgttacttaatccagaaactggcacttgacccaactctgccacgtgggtcgttttgctatcgacagattgggagattttcatagtagagttcagcatgatagctacgtaaatgtgttccgcaccgtcacaaagtgttttctactgttctttcttctttcgttcattcagttgagttgagtgagtgctttgttcaatggatcttagctaaaatgcatattttttctcttggtaaatgaatgcttgtgatgtcttccaagtgatttcctttccttcccatatgatgctaggtacctttagtgtcttcctgaaaaaaaaaaaaggctcgccatcaaaacgatattcgttggcttttttttctgaattataaatactctttagtaactttccattttcaagaacctcttttttccagttatatcatggtcccctttcaaagttattctctactctttttcatattcattctttttcatcctttggttttttattcttaacttgtttattattctctcttgtttctatttacaagacaccaatcaaaacaaataaaacatc

SEQ ID NO: 22 - DNA, 583 bp, Artificial Sequence
  Synthetic sequence
acatagtgtttaaagattacggatatttaacttacttagaataatgccatttttttgagttataataatcctacgttagtgtgagcgggatttaaactgtgaggaccttaatacattcagacacttctgcggtatcaccctacttattcccttcgagattatatctaggaacccatcaggttggtggaagattacccgttctaagacttttcagcttcctctattgatgttacacctggacaccccttttctggcatccagtttttaatcttcagtggcatgtgagattctccgaaattaattaaagcaatcacacaattctctcggataccacctcggttgaaactgacaggtggtttgttacgcatgctaatgcaaaggagcctatatacctttggctcggctgctgtaacagggaatataaagggcagcataatttaggagtttagtgaacttgcaacatttactattttcccttcttacgtaaatatttttctttttaattctaaatcaatctttttcaattttttgtttgtattcttttcttgcttaaatctataactacaaaaaacacatacataaa

SEQ ID NO: 23 - DNA, 600 bp, Artificial Sequence
  Synthetic sequence
tccctgcgcggctaaagttaaggatgcaaaaaacataagacaactgaagttaatttacgtcaattaagttttccagggtaatgatgttttgggcttccactaattcaataagtatgtcatgaaatacgttgtgaagagcatccagaaataatgaaaagaaacaacgaaactgggtcggcctgttgtttcttttctttaccacgtgatctgcggcatttacaggaagtcgcgcgttttgcgcagttgttgcaacgcagctacggctaacaaagcctagtggaactcgactgatgtgttagggcctaaaactggtggtgacagctgaagtgaactattcaatccaatcatgtcatggctgtcacaaagaccttgcggaccgcacgtacgaacacatacgtatgctaatatgtgttttgatagtacccagtgatcgcagacctgcaatttttttgtaggtttggaagaatatataaaggttgcactcattcaagatagtttttttcttgtgtgtctattcattttattattgtttgtttaaatgttaaaaaaaccaagaacttagtttcaaattaaattcatcacacaaacaaacaaaacaaa

SEQ ID NO: 24 - DNA, 500 bp, Artificial Sequence
  Synthetic sequence
cgacgtgcaccaacttgcggaaagtggaatcccgttccaaaactggcatccactaattgatacatctacacaccgcacgccttttttctgaagcccactttcgtggactttgccatatgcaaaattcatgaagtgtgataccaagtcagcatacacctcactagggtagtttctttggttgtattgatcatttggttcatcgtggttcattaattttttttctccattgctttctggctttgatcttactatcatttggatttttgtcgaaggttgtagaattgtatgtgacaagtggcaccaagcatatataaaaaaaaaaagcattatcttcctaccagagttgattgttaaaaacgtatttatagcaaacgcaattgtaattaattcttattttgtatcttttcttcccttgtctcaatcttttatttttattttatttttcttttcttagtttctttcataacaccaagcaactaatactataacatacaataata

SEQ ID NO: 25 - DNA, 500 bp, Artificial Sequence
  Synthetic sequence
aattacataatcatttctccgtgcgagttataagtgcttttctcgtgcatttccctgacacttcacaaaaccttctttttcttttttctttatttcaggggaaatcagtgcaaaactaaaaagaaagaaattttgtgaaatgtaaactccaggtgtcaaaaaataaattatatccgtggaaaatcaggcgtcggaaattgtagatgaatccgcctcctccacaataaaaatgctgaccacacgagcaatgcatacactcggacaccttcgttcaaagtatcagtagcagttcgacacaccctatactacttagctcttaaggtctaggctcatctttctcagttcctctttttcgctaaataaaggtatataatgtcacagctgtgtaactaaagaacactgttgttcctatctttttcttcttctttttttggtatgagttggaaaaaataatcattgcacaattgagtactaaaagctttcgtatcttacccaatatc

SEQ ID NO: 26 - DNA, 250 bp, Artificial Sequence
  Synthetic sequence
tcatgtaattagttatgtcacgcttacattcacgccctccccccacatccgctctaaccgaaaaggaaggagttagacaacctgaagtctaggtccctatttatttttttttatagttatgttagtattaagaacgttatttatatttcaaatttttcttttttttctgtacaaacgcgtgtacgcatgtaacattatactgaaaaccttgcttgagaaggttttgggacgctcgaaggctttaatttgc

SEQ ID NO: 27 - DNA, 324 bp, Artificial Sequence
  Synthetic sequence
tggacttcttcgccagaggtttggtcaagtctccaatcaaggttgtcggcttgtctaccttgccagaaatttacgaaaagatggaaaagggtcaaatcgttggtagatacgttgttgacacttctaaataagcgaatttcttatgatttatgatttttattattaaataagttataaaaaaaataagtgtatacaaattttaaagtgactcttaggttttaaaacgaaaattcttattcttgagtaactctttcctgtaggtcaggttgctttctcaggtatagcatgaggtcgctcttattgaccacacctctaccggcatgc

SEQ ID NO: 28 - DNA, 401 bp, Artificial Sequence
  Synthetic sequence
aacaaatcgctcttaaatatatacctaaagaacattaaagctatattataagcaaagatacgtaaattttgcttatattattatacacatatcatatttctatatttttaagatttggttatataatgtacgtaatgcaaaggaaataaattttatacattattgaacagcgtccaagtaactacattatgtgcactaatagtttagcgtcgtgaagactttattgtgtcgcgaaaagtaaaaattttaaaaattagagcaccttgaacttgcgaaaaaggttctcatcaactgtttaaaaggaggatatcaggtcctatttctgacaaacaatatacaaatttagtttcaaagatgaatcagtgcgcgaaggacataactcatgaagcctccagtatacc

SEQ ID NO: 29 - DNA, 400 bp, Artificial Sequence
  Synthetic sequence
gcggatctcttatgtctttacgatttatagttttcattatcaagcatgcctatattagtatatagcatctttagatgacagtgttcgaagtttcacgaataaaagataatattctactttttgctcccaccgcgtttgctagcacgagtaaacaccatccctcgcctgtgagttgtacccattcctctaaactgtagacatggtagcttcagcagtgttcgttatgtacggcatcctccaacaaacagtcggttatagtttgtcctgctcctctgaatcgtctccctcgatatttctcattttccttcgcatgccagcattgaaatgatcgaagttcaatgatgaaacggtaattcttctgtcatttactcatctcatctcatcaagttatataattcta

SEQ ID NO: 30 - DNA, 400 bp, Artificial Sequence
  Synthetic sequence
agtgcttttaactaagaattattagtcttttctgcttattttttcatcatagtttagaacactttatattaacgaatagtttatgaatctatttaggtttaaaaattgatacagttttataagttactttttcaaagactcgtgctgtctattgcataatgcactggaaggggaaaaaaaaggtgcacacgcgtggctttttcttgaatttgcagtttgaaaaataactacatggatgataagaaaacatggagtacagtcactttgagaaccttcaatcagctggtaacgtcttcgttaattggatactcaaaaaagatggatagcatgaatcacaagatggaaggaaatgcgggccacgaccacagtgatatgcatatgggagatggagatgatacct

SEQ ID NO: 31 - DNA, 401 bp, Artificial Sequence
  Synthetic sequence
gttaattcaaattaattgatatagttttttaatgagtattgaatctgtttagaaataatggaatattatttttatttatttatttatattattggtcggctcttttcttctgaaggtcaatgacaaaatgatatgaaggaaataatgatttctaaaattttacaacgtaagatatttttacaaaagcctagctcatcttttgtcatgcactattttactcacgcttgaaattaacggccagtccactgcggagtcatttcaaagtcatcctaatcgatctatcgtttttgatagctcattttggagttcgcgattgtcttctgttattcacaactgttttaatttttatttcattctggaactcttcgagttctttgtaaagtctttcatagtagcttact

SEQ ID NO: 32 - DNA, 400 bp, Artificial Sequence
  Synthetic sequence
atttaactccttaagttactttaatgatttagtttttattattaataattcatgctcatgacatctcatatacacgtttataaaacttaaatagattgaaaatgtattaaagattcctcagggattcgatttttttggaagtttttgtttttttttccttgagatgctgtagtatttgggaacaattatacaatcgaaagatatatgcttacattcgaccgttttagccgtgatcattatcctatagtaacataacctgaagcataactgacactactatcatcaatacttgtcacatgagaactctgtgaataattaggccactgaaatttgatgcctgaaggaccggcatcacggattttcgataaagcacttagtatcacactaattggcttttcgc

SEQ ID NO: 33 - DNA, 401 bp, Artificial Sequence
  Synthetic sequence
gattaatataattatataaaaatattatcttcttttctttatatctagtgttatgtaaaataaattgatgactacggaaagcttttttatattgtttctttttcattctgagccacttaaatttcgtgaatgttcttataagggacggtagatttacaagtgatacaacaaaaagcaaggcgctttttctaataaaaagaagaaaagcatttaacaattgaacacctctatatcaacgaagaatattactttgtctctaaatccttgtaaaatgtgtacgatctctatatgggttactcagaagtgtaccgaagactgcattgaaagtttatgttttttcactgcaagcgtcattttcgctttgagaagatgttcttattcaaatttcaactgttatatag

SEQ ID NO: 34 - protein, 346 aa, Artificial Sequence
  Synthetic sequence
METVSKIDQQNQAKIWKQIYGFAESLVLKCAVQLEIAETLHNNVKPMSLSELASKLPVAQPVNEDRLFRIMRYLVHMELFKIDATTQKYSLAPPAKYLLRGWEKSMVDSILCINDKDFLAPWHHLGDGLTGNCDAFEKALGKSIWVYMSENPEKNQLFNAAMACDTRLVTSALANECKSIFSDGISTLVDVGGGTGTAVKAISKAFPDIKCTIYDLPHVIADSPEIPNITKISGDMFKSIPSADAIFMKCILHDWNDDECIQILKRCKEALPKVGKVIIVDVVIDMDSTHPYAKIRLTLDLDMMLNTGGKERTKEEWKTLFDAAGFASHKVTQISAVQSVIEAYPY

SEQ ID NO: 35 - DNA, 1041 bp, Artificial Sequence
  Synthetic sequence
atggaaacagtatcaaagatcgaccaacaaaaccaagcaaagatctggaaacaaatctacgggttcgccgagtccctcgtcttaaagtgtgcagtgcaacttgaaatagctgaaacattgcataacaacgtgaagcctatgtcattgtctgaactagcaagcaaactacctgtcgctcagccagttaatgaggataggttgttccgtatcatgagataccttgtccatatggagttgtttaagatagacgctacaacacagaagtactccctagcacctccagccaagtatctgctcagagggtgggagaaaagtatggttgattctatcctgtgtattaacgataaagactttttagccccatggcatcacttgggcgatggcttaacaggaaattgcgatgcgtttgaaaaggctcttggtaagtctatctgggtatacatgtctgttaacccagagaaaaaccaattgttcaacgcggcaatggcatgcgacactagactcgtaacttcagcgttggccaatgaatgcaaatcaatcttttctgacggaatttctacgctagttgatgtaggaggtggtacaggaactgcagttaaagctatatctaaagcattccctgacattaagtgtactatctacgatctacctcatgtgatagctgatagcccagaaattccaaacattaccaaaatctccggtgatatgttcaaatcaataccatctgccgatgcgattttcatgaaatgtatcttacatgattggaatgatgatgaatgtattcaaatcttaaagagatgtaaggaagcattacctaagggcggtaaggttatcattgtcgatgttgttattgatatggatagtactcacccatacgctaagataagacttaccctggatttggacatgatgttgaatacaggtggcaaggagcgaaccaaggaagagtggaaaacgttgtttgatgctgctggtttcgcctcacacaaagttactcagatcagtgctgtccaatccgtgatcgaagcctatccatattga

SEQ ID NO: 36 - protein, 346 aa, Papaver somniferum; identical to SEQ ID NO: 34

SEQ ID NO: 37 - DNA, 1041 bp, Papaver somniferum
  misc_feature (672)..(672): n is a, c, g, or t
atggaaacagtaagcaagattgatcaacaaaaccaagcaaaaatctggaaacaaatttacggtttcgcagaatcactagttctgaaatgtgcagtccaactagagattgctgaaacacttcacaacaatgtcaaacccatgtctttatccgaattggcatcgaaacttcccgttgctcaacccgttaacgaagaccgtctgttccgaattatgcgttacttggttcacatggagctcttcaaaatagatgctaccacgcagaaatactcattagctccaccagctaagtatttgttgagaggctgggagaaatcaatggttgattcaattttatgcataaatgataaggatttcttagctccatggcaccatttaggcgacggtttgaccggtaactgtgacgcttttgagaaagcgttggggaagagtatttgggtgtatatgagtgtaaatcctgaaaagaatcaattgtttaatgcagcaatggcttgtgatactagattggttacttctgcattggctaatgagtgcaaaagtattttcagtgatggaatcagtacactggttgatgtcggcggtggtacgggtactgcagtgaaagccatatctaaagcttttccggatattaagtgcactatctatgatcttcctcatgtcatagctgattctccngaaatccccaatatcactaaaatttctggagatatgttcaagtctattcctagtgctgatgccatcttcatgaagtgcatacttcacgactggaacgatgacgaatgcattcaaatcttgaagagatgcaaagaagcattaccaaaaggtggcaaagttattatcgtggatgtcgtgatagacatggattcgactcatccatatgcaaaaattagactcacactggatttggatatgatgcttaacactggtggaaaagagagaaccaaagaagaatggaagacactttttgatgccgctggttttgctagccacaaagtcactcagatatctgctgtccaatctgtaattgaggcttacccttattaa

SEQ ID NO: 38 - protein, 351 aa, Artificial Sequence
  Synthetic sequence
MQLKAKEELLRNMELGLIPDQEIRQLIRVELEKRLQWGYKETHEEQLSQLLDLVHSLKGMKMATEMENLDLKLYEAPMEFLKIQHGSNMKQSAGYYTDESTTLDEAEIAMLDLYMERAQIKDGQSVLDLGCGLGAVALFGANKFKKCQFTGVTSSVEQKDYIEGKCKELKLTNVKVLLADITTYETEERFDRIFAVELIEHMKNYQLLLKKISEWMKDDGLLFVEHVCHKTLAYHYEPVDAEDWYTNYIFPAGTLTLSSASMLLYFQDDVSVVNQWTLSGKHYSRSHEEWLKNMDKNIVEFKEIMRSITKTEKEAIKLLNFWRIFCMCGAELFGYKNGEEWMLTHLLFKKK

SEQ ID NO: 39 - DNA, 1056 bp, Artificial Sequence
  Synthetic sequence
atgcaactgaaagcaaaggaagagctattgagaaacatggaactcggtctaatcccagatcaggagattagacaacttatcagagttgagttggaaaagagactgcagtggggctacaaggaaacgcacgaagagcaattatctcagcttttagatttggtgcactccctcaagggtatgaagatggccaccgaaatggaaaaccttgatttgaaattgtacgaagctccaatggaatttctaaagattcagcacggatcaaatatgaagcaatcagctggttactatacagatgaatctacaactctagatgaggctgaaatagctatgttggatctttacatggagagagcacaaatcaaggacggtcaatctgtcttggatttgggctgtgggctgggagcggttgctctatttggtgccaataagttcaaaaagtgtcaattcactggagtgacatctagtgtcgaacaaaaagattacattgaaggcaagtgtaaggaactaaaactgactaatgttaaagtcttactcgcagatataaccacatatgaaacagaagagcgtttcgacaggatctttgcagttgagttgatagagcatatgaaaaactaccagcttctcttgaaaaagatttctgaatggatgaaggacgatggcttgttgttcgtggaacatgtatgccataagacattagcatatcattacgaacctgtagacgccgaggattggtacaccaattacatcttccctgctggtacacttactctatcatcagcctccatgttactttactttcaagatgatgtatcagttgtcaatcaatggacattaagcggtaaacactattctagaagtcatgaagagtggttgaaaaacatggacaaaaacattgtagagtttaaggaaatcatgagatcaatcactaagacagagaaggaagcgattaagctgctgaacttctggcgaatattctgcatgtgtggtgccgaattgttcggatacaaaaacggggaagagtggatgttaactcatctactctttaagaaaaagtaa

SEQ ID NO: 40 - protein, 351 aa, Papaver somniferum?; identical to SEQ ID NO: 38

SEQ ID NO: 41 - DNA, 1056 bp, Papaver somniferum
atgcagctaaaggcaaaggaagagctgttgagaaacatggagcttgggttgataccggaccaagagattagacaactgattagagtcgaattagaaaagcgtctccaatggggttacaaagaaacccatgaagaacagctttctcagcttcttgacttggttcactctctgaaaggtatgaaaatggcaactgagatggagaatttggatttaaaactatacgaagcacctatggaattcttaaagatccaacatggaagcaacatgaaacaaagtgcgggttactacactgatgaatcaacaacgttggacgaagctgagatagcgatgctggatttgtatatggagagggcacagatcaaagatggtcagagtgtacttgatttagggtgtggattgggtgctgtagctcttttcggggcaaacaaatttaagaaatgtcaatttactggagttacaagttctgtggaacaaaaagattacattgaaggaaaatgcaaggagcttaagttgaccaacgtcaaggttttattagctgatataacaacttacgaaaccgaagaaagatttgatcggattttcgctgttgaattgattgagcatatgaagaactatcaattgcttcttaagaaaatatcagagtggatgaaagatgatggacttcttttcgttgaacatgtttgccataagactctagcttaccattatgagcccgttgatgcagaagattggtacactaattacatattccctgctggaactctgactctatcatctgcttcaatgcttctttactttcaagatgatgtttcagttgtgaatcaatggactctgagtggaaagcattactctagatcccatgaagaatggttgaaaaacatggataaaaacattgttgaattcaaagaaataatgaggtccataactaaaactgagaaagaagcaatcaaattgctcaatttttggaggattttttgcatgtgtggagcagagttgtttgggtataagaatggtgaagaatggatgctcacccatcttctcttcaagaaaaaatga

SEQ ID NO: 42 - protein, 357 aa, Artificial Sequence
  Synthetic sequence
MGSLDAKPAAATQEVSIKDQAQLWNIIYGFADSLVLRCAVEIGIADIIKNNDGAITLAQLAAKLPITNVSSDYLYRMVRYLVHLNIIEQETCNGGVEKVYSLKPVGTLLLRDAERSMVPMILGMTQKDFMVSWHFMKEGLGNGSTTAFEKGMGMDIWKYLEGNPDQSQLFNEGMAGETRLLTKTLIEDCRDTFQGLDSLVDIGGGNGTTIKAIYEAFPHIKCTLYDLPHVVANSHDLPNIEKVPGDMFKSVPSAQAILLKLILHDWTDEECVNILKKCKEAIPKETGKVIIVDVALEEESNHELTKTRLILDIDMLVNTGGRERTADDWENLLKRAGFRSHKIRPIRAIQSVIEAFP

SEQ ID NO: 43 - DNA, 1074 bp, Artificial Sequence
  Synthetic sequence
atgggttccttggatgcgaagccagccgctgcgacacaagaggtttctatcaaagatcaggctcaactgtggaacatcatctacggtttcgctgacagtttggttttacgttgcgctgtggaaataggtattgcagatatcatcaaaaacaacgacggcgcaattacattggcccaattagctgctaagttgccaattacgaatgttagttcagattacctatacagaatggttaggtacttagttcatctaaacattatcgaacaggaaacatgcaatgggggcgttgaaaaggtctatagtcttaagcctgtagggactttgttgttaagagatgctgaacgttctatggtccctatgattctcggaatgacccaaaaagacttcatggtttcctggcacttcatgaaagagggtcttggtaacggatctactacggccttcgaaaagggcatgggtatggacatatggaagtatctagaggggaaccctgatcaatcacaacttttcaatgagggtatggctggtgaaactaggctgcttactaagacattgatcgaagattgtagagatacatttcagggattagattcacttgtggatataggtggtggaaatggtactacaatcaaagctatctacgaggcatttccacatatcaaatgcacactgtacgatttgcctcatgtcgtcgcaaattctcatgatctaccaaacatcgaaaaggtccctggcgatatgttcaagagcgtaccatcagcccaagccatcttactgaaactgatcttacacgattggactgacgaagagtgtgtaaacatattgaaaaagtgtaaggaagctataccaaaggaaacaggaaaggtcatcatagtagacgtagcactcgaagaggaatccaatcacgaactaactaaaaccagactcattttggatattgatatgcttgtgaacaccggcggtagagagagaactgccgatgactgggagaacttattgaaaagagccggcttcagatctcataagattcgaccaattagagcaatacaatctgttatagaagcttttccataa

SEQ ID NO: 44 - protein, 357 aa, Papaver somniferum; identical to SEQ ID NO: 42

SEQ ID NO: 45 - DNA, 1174 bp, Papaver somniferum
atgggtagtagtatagatgctgaaacacatgaagttgacatcaaagatcaagctcaattatggaatataatctatggttatgctgattctcttgttcttcgttgcacagtagagattggaatcgcagatattatcaaaaacaataatgggtcaatcacactttcagagcttgtatcgaaactaccactttcaaatgtgaattctgataatttgtacagacttctaagatacttagtacacctgaatatcttaggacaacaaacttgtgctgctggagttgatagggtttactcacttaaaccagttggcacattattattaaaagattctgaaagaagcatggcaccagtaatattaggcctgtcacaaaaagatttcttgtttgtatggaatttcgtgaaagaaggattaggcactggaagtacaacagcatttgagaaagcaatgggaatggatatgtggaagtatttagaagttaatcctaatcaaagtcagttgtttgatgaagggcaagctggagaaacaagacttttaactaaaactctacttgtagattgtagagatacttttcaaggtatggattcgcttgttgatgttggtggaggaaacggtacgacaattaaggcaatccatgaagcttttcctcatattaaatgtacgctttatgatcttcctcatgttattgctaactctgatgatcaccctaacatcctaaaagttcccggtgatatgttcatgtctgttccaagtgctcaagttctcttactcaagtgcgtcttgcatgactggactgatgaacactgcgtcaacattctaaagaaatgcaaagaagcaatcccgaaagagacagggaaagtgatcatagtggatgtagcacttgaagaagaatctgaacatgaacttacaaaggcaagattgattcttgatattgatatgttggtgaatacaggtggtagagagagaactgcagaggattgggaaaatttgctcaaacgtgcaggctttcggtctcataagatcagaccgattcgcgctattcagtctgtcattgaagctttcccatagtaaaagctctaaggagtactttgctcttatgaacaataagtcatcttcacttgaggagatgttccctatttccttcgtttgtttcttttcgcttgtgataagcatgtta

SEQ ID NO: 46 - protein, 513 aa, Artificial Sequence
  Synthetic sequence
MGDVNDNLLSSCLNSHGVHNFTTLSTDTNSDYFKLLHASMQNPLFAKPTVSKPSFIVMPGSKEELSSTVHCCTRESWTIRLRSGGHSYEGLSYTADTPFVIVDMMNLNRISIDVLSETAWVESGATLGELYYAIAQSTDTLGFTAGWCPTVGSGGHISGGGFGMMSRKYGLAADNVVDAILIDSNGAILDREKMGDDVFWAIRGGGGGVWGAIYAWKIKLLPVPEKLTVFRVTKNVGIEDASSLLHKWQYVADELDEDFTVSVLGGVNGNDAWLMFLGLHLGRKDAAKTIIDEKFPELGLVDKEFQEMSWGESMAFLSGLDTISELNNRFLKFDERAFKTKVDFTKVSVPLNVFRHALEMLSEQPGGFIALNGFGGRMSEISTDFTPFPHRKGTKLMFEYIIAWNQDEESKIGEFSEWLAKFYDYLEPFVSKEPRVGYVNHIDLDIGGIDWRNKSSTTNAVEIARNWGERYFSSNYERLVKAKTLIDPNNVFNHPQSIPPTMKFEEIYMLKEL

SEQ ID NO: 47 - DNA, 1542 bp, Artificial Sequence
  Synthetic sequence
atgggtgatgttaatgataatctcctctcgtcatgtttaaactcccatggtgttcacaacttcaccacgctatcaaccgatacaaattccgactacttcaaactgctgcatgcatccatgcagaacccgttgttcgcgaagcctacggtatcgaaaccgtcgtttattgtaatgcccggcagcaaagaagaattatcgagcaccgttcattgttgtacaagagaatcatggactattcgactgcggagcggcggtcatagttatgaagggttgtcttatactgctgatacaccttttgtgattgttgatatgatgaacttgaatcgaatttccattgatgtcttgtcggaaacagcttgggttgaatctggggcaacacttggagaactctattatgcgattgcgcagtcgacggataccctggggtttactgctggttggtgtccgactgttggtagcggaggacatataagcggtggtggttttggtatgatgtcgaggaagtacggattagctgcggataatgtcgtggacgcgattcttatagatagcaatggagcgattcttgaccgtgaaaaaatgggtgacgatgttttttgggctattcgtggtggcggcggaggtgtttggggtgcaatttacgcgtggaaaatcaaactattgccagttccggagaagctgaccgtttttcgtgtgacaaagaatgtaggaatcgaagacgcttcatctttacttcacaaatggcaatatgtcgcagatgaattagacgaggattttacggtatccgtgcttgggggagtaaacggaaatgatgcctggttaatgttcttaggcttacacttgggacgtaaagatgctgcgaaaactataatcgatgaaaaattccctgaactggggttagtagataaagagtttcaagaaatgagttggggtgaatccatggctttcttatcaggattagatacaatctctgaactaaacaacaggttcttgaaatttgatgaaagagcttttaagactaaagttgattttactaaagtatcagtacccctaaacgtgtttagacatgcattagagatgttatcagaacagcccggtgggtttatagctctaaatggtttcggagggagaatgagtgaaattagcactgattttaccccgtttcctcatcggaaaggcactaaattgatgttcgaatatataatcgcttggaaccaagatgaagaatcgaaaatcggcgagtttagcgaatggttagcgaagttttacgattatttggaaccgttcgtgtcgaaagaaccaagggttggttatgttaatcatattgatcttgatattggagggatagattggagaaataaaagtagtactaccaatgctgttgagatagctagaaattggggtgaaagatatttttcatcgaattatgaacgtttggttaaggctaagacattgattgatccaaataatgtgtttaaccatccacagagtatacctccaacgatgaaatttgaggaaatttacatgttgaaggaattgtga

SEQ ID NO: 48 - protein, 535 aa, Papaver somniferum?
MMCRSLTLRFFLFIVLLQTCVRGGDVNDNLLSSCLNSHGVHNFTTLSTDTNSDYFKLLHASMQNPLFAKPTVSKPSFIVMPGSKEELSSTVHCCTRESWTIRLRSGGHSYEGLSYTADTPFVIVDMMNLNRISIDVLSETAWVESGATLGELYYAIAQSTDTLGFTAGWCPTVGSGGHISGGGFGMMSRKYGLAADNVVDAILIDSNGAILDREKMGDDVFWAIRGGGGGVWGAIYAWKIKLLPVPEKLTVFRVTKNVGIEDASSLLHKWQYVADELDEDFTVSVLGGVNGNDAWLMFLGLHLGRKDAAKTIIDEKFPELGLVDKEFQEMSWGESMAFLSGLDTISELNNRFLKFDERAFKTKVDFTKVSVPLNVFRHALEMLSEQPGGFIALNGFGGKMSEISTDFTPFPHRKGTKLMFEYIIAWNQDEESKIGEFSEWLAKFYDYLEPFVSKEPRVGYVNHIDLDIGGIDWRNKSSTTNAVEIARNWGERYFSSNYERLVKAKTLIDPNNVFNHPQSIPPMMKFEEIYMLKEL

SEQ ID NO: 49 - DNA, 1608 bp, Papaver somniferum?
atgatgtgcagaagcttaacattacgtttcttcttattcattgttttattacaaacatgcgtacgaggtggtgatgttaatgataatctcctctcgtcatgtttaaactcccatggtgttcacaacttcaccacgctatcaaccgatacaaattccgactacttcaaactgctgcatgcatccatgcagaacccgttgttcgcgaagcctacggtatcgaaaccgtcgtttattgtaatgcccggcagcaaagaagaattatcgagcaccgttcattgttgtacaagagaatcatggactattcgactgcggagcggcggtcatagttatgaagggttgtcttatactgctgatacaccttttgtgattgttgatatgatgaacttgaatcgaatttccattgatgtcttgtcggaaacagcttgggttgaatctggggcaacacttggagaactctattatgcgattgcgcagtcgacggataccctggggtttactgctggttggtgtccgactgttggtagcggaggacatataagcggtggtggttttggtatgatgtcgaggaagtacggattagctgcggataatgtcgtggacgcgattcttatagatagcaatggagcgattcttgaccgtgaaaaaatgggtgacgatgttttttgggctattcgtggtggcggcggaggtgtttggggtgcaatttacgcgtggaaaatcaaactattgccagttccggagaagctgaccgtttttcgtgtgacaaagaatgtaggaatcgaagacgcttcatctttacttcacaaatggcaatatgttgcagatgaattagacgaggattttacggtatccgtgcttgggggagtaaacggaaatgatgcctggttaatgttcttaggcttacacttgggacgtaaagatgctgcgaaaactattatcgatgaaaaattccctgaactggggttagtagataaagagtttcaagaaatgagttggggtgaatccatggctttcttatcaggattagataccatctctgaactaaacaacaggttcttgaaatttgatgaaagagcttttaagactaaagttgattttactaaagtatcagtacccctaaacgtgtttagacatgcattagagatgttatcagaacagcccggtgggtttatagctctaaatggtttcggagggaaaatgagtgaaattagcactgattttaccccgtttcctcatcggaaaggcactaaattgatgttcgaatatataatcgcttggaaccaagatgaagaatcgaaaatcggcgagtttagcgaatggttagcgaagttttacgattatttggaaccgttcgtgtcgaaagaaccaagggttggttatgttaatcatattgatcttgatattggagggatagattggagaaataaaagtagtactaccaatgctgttgagatagctagaaattggggtgaaagatatttttcatcgaattatgaacgtttggttaaggctaagacattgattgatccaaataatgtgtttaaccatccacagagtatacctccaatgatgaaatttgaggaaatttacatgttgaaggaattgtag

SEQ ID NO: 50 - protein, 492 aa, Papaver somniferum
MEVTFWLITCGVVVAFALAKLLFGKKSSMSTMEWPSGPKTLPIIGNLHQLGGEAFHVCLANLAKVYGGVFTIWVGSWRPFIVISDVDKAWEVLVNKSSDYSARDMPDITKIISANWKNISHGDSGPFWHNLRKGLQGVALTPFNVASQYHLQERDMQNLIKSMKKKASQKNGILKPLDYVKEETVRLLSRLIFGQDFVDEDFVVGMHQALDELVSISGYASLADAFKFCENLPSHKKTVRAVHAIKIRFDNLIRPHIVSNPPTNTYLHFLLSQDFSEDVIISAILEVYDLGVDSTASTTVWALTFLVREQKIQEKLYREINNVTGGKKPVKVEDLNKLPYLQAVMKETMRMKPIAPMAIPHKASKDTSLMGKKINKGAVVMVNLYAIHHNPAVFPEPYKFMPERFLKDANSDGSLGDIKKMESSLLAFSAGMRICAGMELGKLQLAFGLASLVNEFKWDCFAEGKLPDLSEEHCFILLMKNPLEAKITPRIH

SEQ ID NO: 51 - DNA, 1479 bp, Papaver somniferum
atggaggtgacattttggttgataacttgtggagtggtagtagcatttgcattagcaaaactactattcggcaagaaatcatctatgtccacaatggaatggccatcaggtccaaagacgttgcccataattgggaaccttcatcaattaggaggagaagcatttcatgtctgtttggcaaacttggccaaagtatatggaggtgtttttaccatatgggttggaagttggcgtccgtttatagtcataagcgatgtcgataaagcttgggaagttcttgttaacaaatcttcggattattcagctagagacatgcctgatattactaaaatcatatctgcaaactggaagaatatttctcatggtgattccggtccgttttggcataatttaagaaaaggtcttcaaggtgttgctttaactccttttaatgttgcgtctcaatatcatttgcaagaaagggacatgcagaatttgatcaaatccatgaaaaaaaaggcgtcccagaaaaatgggattttgaaaccacttgattatgtcaaagaagagactgttcggttactaagtcgacttatcttcggtcaagatttcgtcgatgaggatttcgttgttggtatgcatcaagcactggacgagttagtaagtataagtgggtatgcaagtttagctgatgcttttaaattctgtgagaatctaccaagccataagaaaactgtccgagcagttcacgctatcaaaattcggttcgataatttgattcgtccgcatatcgtctcaaatcctccgacaaacacttacttacattttcttttatctcaagattttagtgaagatgttataatctctgccattcttgaagtttatgacttaggggttgacagcactgcatccacaacagtttgggctcttacgttccttgtccgcgaacaaaagattcaggaaaaactgtaccgcgagatcaataacgtaaccggagggaaaaaaccggtgaaagttgaagatttgaacaaattgccatatttgcaagcagtgatgaaagaaacaatgaggatgaaaccaatcgcaccaatggcgattcctcacaaggcttcaaaagatacttccttaatgggtaaaaagatcaacaaaggtgcggtggtaatggtaaatctttatgctattcatcataaccctgccgttttcccggaaccgtataagttcatgcccgagagattcctaaaggatgctaatagtgatggaagtttgggtgatataaagaaaatggaaagttcattgttagcattcagtgccggtatgcgaatctgtgctggaatggagcttggtaagctacaactagctttcggtcttgcaagtttggtgaatgagttcaaatgggattgctttgctgaagggaagttgcctgatcttagtgaagaacactgtttcattctgttgatgaagaacccacttgaagccaaaattactcctcgtatccattaa

SEQ ID NO: 52 - protein, 492 aa, Papaver somniferum
MEVTFWLITCGVVVAFALAKLLFGKKSSMSTMEWPSGPKTLPIIGNLHQLGGEAFHVCLANLAKVYGGVFTIWVGSWRPFIVISDVDKAWEVLVNKSSDYSARDMPDITKIISANWKNISHGDSGPFWHNLRKGLQGVALTPFNVASQYHLQERDMQNLIKSMKKKASQKNGILKPLDYVKEETVRLLSRLIFSQEFVDEDFVVGMHQALDELVSISGYASLADAFKFCENLPSHKKTIRAVHAIKIRFDNLIRPHIVSNPPTNTYLHFLLSQDFSEDVIISAILEVYDLGVDSTASTTVWALTFLVREQKIQEKLYREINNVTGGKRPVKVEDLNKLPYLQAVMKETMRMKPIAPMAIPHKASKDTSLMGKKINKGTVVMVNLYAIHHNPAVFPEPYKFMPERFLKDANSDGSLGDIKKMESSLLAFSAGMRICAGMELGKLQLAFGLASLVNEFKWDCVAEGKLPDLSEEHCFILLMKNPLEAKITPRIH

SEQ ID NO: 53 - DNA, 1479 bp, Papaver somniferum
atggaggtgacattttggttgataacttgtggagtggtagtagcatttgcattagcaaaactactattcggcaagaaatcatctatgtccacaatggaatggccatcaggtccaaagacgttgcccataattgggaaccttcatcaattaggaggagaagcatttcatgtctgtttggcaaacttggccaaagtatatggaggtgtttttaccatatgggttggaagttggcgtccgtttatagtcataagcgatgtcgataaagcttgggaagttcttgttaacaaatcttcggattattcagctagagacatgcctgatattactaaaatcatatctgcaaactggaagaatatttctcatggtgattccggtccgttttggcataatttaagaaaaggtcttcaaggtgttgctttaactccttttaatgttgcgtctcaatatcatttgcaagaaagggacatgcagaatttgatcaaatccatgaaaaaaaaggcgtcgcagaaaaatgggattttgaaaccacttgattatgtcaaagaagagactgttcgattactaagtcgacttatcttcagccaagagttcgtcgatgaggattttgttgttggtatgcatcaagcactcgacgagttagtaagtataagtgggtatgcaagtttagctgatgcttttaaattttgtgaaaatttaccaagccataaaaaaactatccgagcagttcacgctatcaaaattcggttcgataatttgattcgtccgcatatcgtctcaaatcctcctacaaacacttacttgcattttcttctatctcaagattttagtgaagatgttataatttctgccattcttgaagtttatgacttgggtgttgatagcaccgcatcaacaacagtttgggctcttacgtttcttgtccgcgaacaaaagattcaggaaaaactataccgtgaaatcaataacgtaaccggagggaaaaggccggtgaaagttgaagatttgaacaagttgccatatttgcaagcagtgatgaaagaaacaatgaggatgaaacccattgcaccaatggcgattcctcacaaagcctcaaaagatacttcattaatgggtaaaaagatcaacaaaggtacagtggtaatggtaaatctttacgctattcatcataaccctgccgttttcccggaaccgtataagttcatgccggagagattcctaaaggatgctaatagtgatggaagtttgggtgatattaagaaaatggaaagttcattgttagcattcagtgctggtatgcgaatctgtgctggaatggagcttggtaagctacaactagctttcggtcttgcaagtttggttaacgagttcaaatgggattgcgttgctgaaggaaaattgcctgatcttagtgaagaacactgtttcattctcttgatgaaaaacccacttgaagccaaaattactcctcgtatccattaa

SEQ ID NO: 54 - protein, 508 aa, Artificial Sequence
  Synthetic sequence
MELSITTSIALATIVFFLYKLATRPKSTKKQLPEASRLPIIGHKRKKSSTMVWPTGPKTLPIIGNMHVLGGTALQVVLHNLAKIHGNVMTIWIGSWRPVIVVSDIDRAWEVLVNKSSDYSARDMPEITKIISADWKTISTSDSGPGWSNLRKGLQNVALSPHNLAAQSQFQEKDITKMIQSLKKEAASNNGIVKPIDHLKKATLRLISRLIFGQDFDDDKYVDDMHHAIEELIRVSGYAQLAEAFYYAKYLPSHKKAVRDVEEANQRVKKLVRPFLSLNPPTNTYLHFLNSQKYDEEVIIFAIFEAYLLGVDSTSLTTAWALAFLIREPVVQDKLYQELKNLTAKNDCEIVKVEDLNKLQYLQAVLKETMRMKPIAPLAIPHKACRDTSLKGNKIDQGTQVMVNIYALHHNEKVWKEPFKFMPERFLQTQDVVNGKGMEQSLLPFSAGMRICAGMELGKLQFSFSLANLVNAFEWSCVSDGVLPDMSDQLGFVLLMKTPLQARIVPRV

SEQ ID NO: 55 - DNA, 1527 bp, Artificial Sequence
  Synthetic sequence
atggaattatcgattactacctcaatagctctagccacaattgttttttttctatataagttggcaacacgtcctaaatccacgaagaaacaattacccgaagctagtcgtttaccaatcattggacacaagagaaagaaatcatccactatggtatggcctactgggcccaaaactctgccaattataggtaatatgcatgttttaggtggaacagcattgcaagttgtgttgcataatctggctaagatacatggcaacgttatgacaatttggattggttcgtggcgtcccgttatagtagttagcgacattgatagggcatgggaagtgttagttaacaagagctcagactactctgccagagatatgcctgaaatcaccaaaattatctcagcggattggaaaacaatctctacttccgattctggtcctggttggtccaatctaagaaaagggctacaaaatgttgctctttctccacataatcttgctgctcaaagtcaatttcaggagaaagacattactaaaatgattcagtctttgaagaaagaagctgcctctaataatgggattgttaaaccgattgatcacttgaagaaagctactcttagacttattagtagattgattttcggacaagattttgacgatgacaagtatgtcgatgatatgcatcatgctatcgaagagctgataagagtgtcaggttatgcgcaattggctgaagcattctactatgcgaaatacttgccatcacacaagaaggctgttagagatgtcgaagaagccaatcagagggtaaagaaattggttagaccgtttctttctttgaatcctccaaccaatacgtacttgcactttctgaacagtcagaaatacgatgaagaggtcattatctttgccatctttgaggcctatctattgggcgtagattccacctccttgaccaccgcatgggcattagcattccttatcagagaaccagtagtccaagacaaattatatcaagaactaaagaacttaacggctaagaatgattgcgaaattgtcaaagtggaagatttaaacaagcttcagtatttgcaagcagtactaaaagagacaatgagaatgaaacctatagcaccactagctatcccacacaaggcctgtagagatactagcttgaaaggcaacaaaatagaccagggtactcaagtaatggtcaatatatacgcattgcatcataacgaaaaggtatggaaggaaccttttaaatttatgccagaaaggttcttacaaacacaagatgtcgtgaacggtaaaggtatggagcagtcgttattgccgttctctgccggtatgagaatatgtgctggaatggaattaggtaaactgcaattcagcttctcattagccaacttggtgaatgcattcgagtggagttgtgttagtgatggagttttacctgacatgtctgaccaattaggctttgtgctgttgatgaaaacacccttacaagcgaggatagtcccaagagtttaa

SEQ ID NO: 56 - protein, 494 aa, Papaver somniferum
MEKTIFSNPWILTTSTLVVITIITMLMVFKRKKSSTMVWPTGPKTLPIIGNMHVLGGTALQVVLHNLAKIHGNVMTIWIGSWRPVIVVSDIDRAWEVLVNKSSDYSARDMPEITKIISADWKTISTSDSGPGWSNLRKGLQNVALSPHNLAAQSQFQEKDITKMIQSLKKEAASNNGIVKPIDHLKKATLRLISRLIFGQDFDDDKYVDDMHHAIEELIRVSGYAQLAEAFYYAKYLPSHKKAVRDVEEANQRVKKLVRPFLSLNPPTNTYLHFLNSQKYDEEVIIFAIFEAYLLGVDSTSLTTAWALAFLIREPVVQDKLYQELKNLTAKNDCEIVKVEDLNKLQYLQAVLKETMRMKPIAPLAIPHKACRDTSLKGNKIDQGTQVMVNIYALHHNEKVWKEPFKFMPERFLQTQDVVNGKGMEQSLLPFSAGMRICAGMELGKLQFSFSLANLVNAFEWSCVSDGVLPDMSDQLGFVLLMKTPLQARIVPRV

SEQ ID NO: 57 - DNA, 1485 bp, Papaver somniferum
atggagaaaaccatcttcagcaatccatggattctgactacttccactctagtagtaataacaatcattaccatgctaatggtattcaaaagaaaaaaatcatcgacaatggtatggccaacagggccaaaaacgttaccaattattggcaacatgcatgttcttggaggtacagctcttcaagttgtcttacataaccttgccaaaattcatggcaacgttatgacgatatggatcggaagttggagaccagttattgtcgtttcggatattgatcgagcatgggaagtacttgttaacaaatcttcggattattcggctcgtgatatgccagaaatcactaagattatttctgctgattggaaaactatttctacttctgattctggtcctggctggtctaatcttcgaaaaggtcttcaaaatgtggcgctatctcctcataatttagctgcacaaagtcaatttcaggaaaaagatattaccaaaatgattcaaagtttgaaaaaagaagctgcgagcaataatggaattgtcaaaccgattgatcatcttaagaaggcgacattaagattaattagtcgattgatttttggccaggatttcgatgatgataaatatgttgatgatatgcatcatgctattgaagagttgatccgtgttagtggttatgctcagcttgccgaggcattttactacgcgaaatacttaccaagtcataagaaagctgttagagacgtcgaagaagcaaatcaaagagtaaaaaagttggtacgaccatttttatcactgaatcctcctactaatacttatttgcattttctcaattcgcagaaatatgacgaagaagtgatcatattcgcgatatttgaagcttatcttttgggtgttgatagtacttctttgactactgcatgggcactcgcatttttaatccgcgaaccagttgtgcaagataaactttatcaagaacttaagaatcttacggccaagaacgattgcgaaatcgtgaaagttgaagatttaaacaagttgcagtatctacaagctgttcttaaagaaacaatgagaatgaaaccaattgcaccattagctataccacataaagcttgtagagacacttcgctaaaggggaacaaaattgatcaaggcacacaggttatggttaacatatatgcattacaccataatgagaaagtctggaaagaaccattcaaatttatgccagaaagatttttacaaactcaagatgttgttaatggaaaaggaatggaacagtcactactaccatttagtgcaggtatgagaatttgtgcaggaatggaattgggtaaacttcagttcagtttctctcttgctaatcttgttaatgcttttgaatggtcttgcgtttctgatggagtacttccggatatgagcgatcaacttggttttgttttgttgatgaagacgccactccaagcacgtatagttcctcgtgtgtaa

SEQ ID NO: 58 - protein, 358 aa, Papaver somniferum
MGSIDEVKKESAGETLGRLLKGEIKDEELKKLIKFQFEKRLQWGYKSSHQEQLSFNLDFIKSLKKMEMSGEIETMNKETYELPSEFLEAVFGKTVKQSMCYFTHESATIDEAEEAAHELYCERAQIKDGQTVLDIGCGQGGLVLYIAQKYKNCHVTGLTNSKAQVNYLLKQAEKLGLTNVDAILADVTQYESDKTYDRLLMIEAIEHMKNLQLFMKKLSTWMTKESLLFVDHVCHKTFAHFFEAVDEDDWYSGFIFPPGCATILAANSLLYFQDDVSVVDHWVVNGMHMARSVDIWRKALDKNMEAAKEILLPGLGGSHETVNGVVTHIRTFCMGGYEQFSMNNGDEWMVAQLLFKKK

SEQ ID NO: 59 - DNA, 1077 bp, Papaver somniferum
atgggttcaatagatgaggtcaagaaggaatcagcaggggaaacactagggagattgttgaaaggagagattaaagatgaggaactgaagaagctgattaagtttcaattcgagaaacgtctgcaatggggttataaatcatctcatcaagaacaactctccttcaaccttgacttcattaaatccttaaaaaagatggaaatgtcaggagagattgagacaatgaacaaggaaacctatgaattaccctcagaattcttagaggcagtttttgggaaaactgtcaagcaaagtatgtgttacttcacacatgaatcagcaacaatagacgaagcagaagaagctgcacatgaattatactgtgaacgagcacaaatcaaagacggacaaactgttcttgacattggttgtggtcaaggtggtctagttctatacattgctcagaaatataagaactgccatgttacagggctcactaattcaaaggcacaagtcaattacttactcaagcaagcagagaagcttgggttgacaaacgtcgacgccatactagcagatgttactcagtatgaatctgacaagacatacgatcgtctacttatgattgaagccatagagcatatgaaaaacttacagctgttcatgaagaaactatcaacttggatgacaaaagaaagtcttctctttgtggaccacgtctgccacaaaacatttgctcacttttttgaggcagtcgatgaggatgactggtactcaggtttcattttccccccaggttgtgcaaccatactagctgctaatagtctcctctatttccaggatgatgtttcagttgtggatcattgggttgtcaatggaatgcacatggctcgttcagtagacatttggagaaaggcgctagacaaaaatatggaagctgcaaaagaaattctattacctggacttggaggaagccacgaaacagtgaatggagtcgttactcacattagaacattctgtatgggaggctatgaacaattctcaatgaacaatggagatgagtggatggttgcgcagctgcttttcaagaagaagtag

SEQ ID NO: 60 - protein, 526 aa, Papaver somniferum
MRTESIKTNRPMDLLLQYLQPISVALVVIALVWNYGRRNPTKKLAPEASGGRPIMGHLHLFNDGELTHRKLGAMADTYGPVFNIRFGSHKTLVVSDWEIVKECFTTNDKLFSNRPGTLGIKLMFYDADSVGYAPYGAYWRDLRKISTLKLLSNHRIDTIKHLRSSEVESCFESLYSQWGNGEKSGEFAPVRMDSWLGDLTFNVVARIVAGKKNFSANGDVGAQRYKAAMDEAMRLMRFFAFSDVIPSLSWLDNLRGLVREMKKCASEIDSIMATWVEEHRVKRNSGGNSQLEHDFIDVCLDIMEHSSLPGDDPDLVVKSTCLDMILGGSDTTTVTLTWAMSLLLNHPQVLQKAKEELETQVGKNRQVDDSDIPNLPFIQAIIKETMRLYPAGPLIERRTMEDCEVAGYQVPAGTRLLVNVWKMQRDGNVYKGDPLEFRPDRFLTSNADVDLKGQHYELIPFGAGRRICPGVSFAVQLMHLVLARLLHEFEITTVEPETKVDMAESGGLLCYKIMPLEVLIKPRLEI

SEQ ID NO: 61 - DNA, 1581 bp, Papaver somniferum
atgcgaaccgaatcaatcaaaacaaacagaccgatggatctacttctccagtacttgcaaccgatttccgttgcacttgttgtgattgcactggtttggaactatggaagaagaaaccccaccaaaaaactagcacctgaagcctcaggagggagacctataatgggtcacttgcatcttttcaacgacggtgagttaactcatcggaaactcggtgcaatggcggatacttatggtcctgttttcaatatccgattcggttcgcataaaacactagttgttagtgattgggaaattgttaaagaatgttttacgacgaatgacaagctcttctcgaatcggccgggtacgttaggtattaaactcatgttttacgacgccgattccgttggttatgcgccgtatggtgcttactggagagatttacgaaagatttctaccttaaaacttctctcgaatcatcgtatcgatacgataaaacatctgaggagttctgaagttgagtcgtgtttcgagtcgctttatagtcagtggggaaacggggaaaagagtggcgaattcgctccggtgagaatggatagttggttaggcgatttgacgtttaatgttgttgccagaattgttgcgggtaagaagaatttctcggccaacggtgacgttggggctcagagatataaagcagcaatggatgaagctatgagattaatgagatttttcgcattttcggatgtaattccctcgctaagctggttagacaatctaagaggtttggtgcgagaaatgaaaaaatgtgcatctgaaattgattcaattatggctacttgggttgaagaacatcgcgtgaaaagaaattcaggaggtaattctcaactcgaacatgattttattgatgtttgcttggatattatggagcattcttcgttacccggcgatgatcccgacctcgtcgtcaaatctacgtgtctggacatgatattgggtgggagtgacacgacgacagttaccctaacatgggctatgtctttactcttgaaccatccccaagtactgcaaaaagcaaaagaagaactagagacacaagtaggaaagaaccggcaagtcgacgactcggacatcccgaatctcccattcatccaagcgatcatcaaagagacgatgaggctgtacccggctggaccattgatcgagcggaggacgatggaggactgcgaagtagccgggtaccaagttccagccggcacgcgcttattggttaacgtctggaagatgcaaagagatgggaacgtatacaaaggcgatccgttggagtttagacccgacaggtttttaactagcaatgcggatgtggatctaaagggtcagcattatgaattgataccatttggagctggtagaaggatatgcccgggagtatcgtttgcggttcaattgatgcatttggttcttgcccgattacttcatgaattcgaaatcacgactgtggagccagaaaccaaggtggatatggctgaaagtggtggtttgctttgttataagataatgccattggaagtactgatcaaacctcgactcgagatatga

SEQ ID NO: 62 - protein, 523 aa, Eschscholzia californica
MDSLMLAYLFPISVASIIAFVFLYNLFSSRTLKNKKIRTAPMATGAWPVLGHLHLFGSGELPHKMLAAMADKYGSAFRMKFGKHTTLVVSDTRIVKECFTTNDTLFSNRPSTKAFQLMTYDNESVAFTPYGSYWREIRKISTLKLLSNHRLQAIKDVRASEVNVCFKTLYDQCKNPSGSAPILIDMKKWFEEVSNNVVMRVIVGRQNFGSKIVQGEEEAIHYKKVMDELLRLASLSMFSDFAPLLGFVDIFQGNLSAMKRNAKKVDAILENWLEEHRKKKNSVAESQQDFMDVMLSIVEESKLSGHDADAVIKATCLAMIMGGTDTTAVSLTWIISLLMNNRHALKKAREELDALVGKDRQVEDSDLKNLVYMNAIVKETMRMYPLGTLLERETKEDCEIDGFHVKGGTRLLVNVWKLQRDPNVWVDPTEFRPERFLTENADIDVGGQHFELLPFGAGRRVCPGVFALQFMHLVLARLIHGYDLNTLNEENVDLTESPEGHVNHKASPLDLILTPRLHYKLYE

SEQ ID NO: 63 - DNA, 1575 bp, Eschscholzia californica
  misc_feature (1396)..(1396): n is a, c, g, or t
atggattccttaatgcttgcttatttgtttccaatttcagttgcttctattattgcttttgttttcctctacaatctcttttcttcaagaactcttaaaaataagaagattaggacagcacccatggcaacaggtgcttggcctgttcttggtcatctccatctctttggttctggtgaattgcctcataaaatgttagctgccatggctgacaagtatggctcagccttcaggatgaagttcggtaaacacacaacactagttgtgagtgatacccgtatcgttaaagaatgtttcactaccaacgataccctcttctctaaccgtccttccactaaagcttttcaactcatgacttacgataatgagtcggttgcctttacaccttacggttcttactggcgcgagattagaaagatatccactcttaaacttctatccaaccatcgtctccaagccatcaaggacgtaagagcctcggaggtaaacgtctgcttcaaaaccttatacgaccagtgtaagaatccaagtggatcagctcctattttgatcgatatgaagaaatggttcgaagaggtctcgaacaacgtggtgatgagggtaattgtggggagacaaaactttgggtctaagattgtgcaaggtgaggaggaagctatccattacaagaaggtcatggatgagctcttacgtctcgctagcttgtctatgttctcggattttgctcctttacttggtttcgtggacatctttcaaggaaacttgagtgccatgaaacgaaacgccaagaaggtagatgcaatcctggagaactggttggaagagcatcgcaagaagaagaactcagttgctgaaagccagcaagatttcatggatgttatgttgtcgattgttgaggagagcaagttgtctggtcacgatgctgatgccgtaattaaagctacttgtctagccatgatcatgggcggaacagataccacagcagtgagtctaacatggatcatttctttattaatgaataatcgtcacgctttgaagaaagctcgagaagagttagatgcactagtaggaaaggacagacaagttgaagattcggatttgaagaatttagtttacatgaatgctattgttaaggaaacaatgagaatgtacccattaggtactcttctcgaacgtgagactaaggaggattgtgagatcgacgggtttcatgtcaaaggtgggactaggttgctagtgaatgtgtggaagttgcaacgagacccaaatgtatgggttgatccaacagaatttagacccgaaagatttctaacggagaatgcagatatagatgttggaggtcagcattttgagttgctaccatttggagcaggacgaagggtgtgccctggggtgncgtttgcactacaattcatgcatttagtacttgctcgcctcatccatggatacgatttgaatactctaaacgaagaaaatgtggatctgacggagagcccagaaggacatgtgaaccacaaagcatcgcctcttgatctcatcctcacccctcgtctacattacaagttgtacgaatag

SEQ ID NO: 64 - protein, 683 aa, Artificial Sequence
  Synthetic sequence
MGSNNLANSIESMLGISIGSEYISDPIFIMVTTVASMLIGFGFFACMKSSSSQSKPIETYKPIIDKEEEEIEVDPGKIKLTIFFGTQTGTAEGFAKALAEEIKAKYKKAVVKVVDLDDYAAEDDQYEEKLKKESLVFFMVATYGDGEPTDNAARFYKWFTQEHERGEWLQQLTYGVFGLGNRQYEHFNKIAVDVDEQLGKQGAKRIVQVGLGDDDQCIEDDFTAWRELLWTELDQLLKDEDAAPSVATPYIATVPEYRVVIHETTVAALDDKHINTANGDVAFDILHPCRTIVAQQRELHKPKSDRSCIHLEFDISGSSLTYETGDHVGVYAENCDETVEEAGKLLGQPLDLLFSIHTDKEDGSPQGSSLPPPFPGPCTLRSALARYADLLNPPRKASLIALSAHASVPSEAERLRFLSSPLGKNEYSKWVVGSQRSLLEIMAEFPSAKPPLGVFFAAVAPRLPPRYYSISSSPKFAPSRIHVTCALVYGQSPTGRVHRGVCSTWMKHAVPQDSWAPIFVRTSNFKLPADPSTPIIMVGPGTGLAPFRGFLQERMALKENGAQLGPAVLFFGCRNRNMDFIYEDELNNFVERGVISELVIAFSREGEKKEYVQHKMMEKATDVWNVISGDGYLYVCGDAKGMARDVHRTLHTIAQEQGPMESSAAEAAVKKLQVEERYLRDVW

SEQ ID NO: 65 - DNA, 2052 bp, Artificial Sequence
  Synthetic sequence
atggggtcaaacaacctggcaaactctatcgagtctatgcttgggatatctattggaagtgaatacatttcagatcctatctttatcatggtaaccaccgtggcttctatgctaataggctttgggtttttcgcatgcatgaaaagttcctcatcacaatcaaaacctattgaaacatacaaacctatcattgataaggaggaagaggaaatcgaagtcgaccctgggaagataaagctcacaatctttttcgggacacaaacaggaacagctgaaggattcgcaaaggccttggctgaagagatcaaagctaagtacaaaaaggccgtggttaaggtggttgaccttgatgattatgccgcggaggatgatcagtacgaggaaaaactcaaaaaggaaagtctcgtgtttttcatggttgctacttatggggacggagaaccaacggataatgccgcaagattctacaagtggtttactcaagagcacgaaagaggtgaatggttacaacagctgacttatggtgtattcggcttgggtaatagacaatacgaacatttcaataagattgcagtagacgttgatgaacaattaggaaagcaaggcgcaaagagaatagttcaagtaggtttaggtgacgatgatcaatgtatcgaagatgatttcacagcatggagagaactcttatggactgaactagaccagcttctcaaggacgaagatgccgctccttctgtcgctactccatacattgcaacagtaccagagtacagagtcgttattcatgaaaccactgttgcggctctagatgataagcatatcaacacagccaacggagatgttgcgttcgatattctgcatccatgtagaacgattgttgcacaacagagagaacttcataagccaaagtccgaccgaagctgcattcacttggaatttgatatctctggttcctccttgacatacgaaactggtgatcatgtaggagtttacgcggaaaactgtgacgagactgtcgaggaagcaggaaagttattgggccagccacttgatttgttattctctatccacacggataaagaggacggttctccacaaggttcatctttacctcctccattccctggtccatgtactttacgtagtgctctagcaagatacgcagacttattgaatccaccacgtaaggcctctctaatagctctttctgctcatgcctctgttccatcagaggctgaaagactaaggtttttgtcatctccattgggcaaaaacgaatactcaaaatgggtagtaggctctcaaagatcattgttagagattatggctgaatttccatctgctaagcctcctttgggtgtgtttttcgctgctgttgcacctcgactaccaccaagatactatagcatttctagttctccaaagtttgctccatccagaatacatgttacatgcgccctggtatatggtcaatcaccaactggtagagtccacaggggagtctgcagcacgtggatgaagcacgccgttcctcaagatagttgggctcctatcttcgttagaacttccaatttcaagttaccagccgacccaagtaccccaatcatcatggtgggaccaggtacaggcctagctccatttcgaggcttcctccaagagagaatggctttgaaagagaacggtgcgcaacttggccctgccgttttgtttttcggatgtaggaacagaaacatggatttcatatacgaagatgaacttaacaatttcgtcgaacgtggtgtcatttctgagctagtaatcgccttctcaagagagggtgagaaaaaggaatatgtgcaacacaagatgatggaaaaagctaccgatgtttggaatgttatctctggggatggttatctgtacgtctgtggcgatgcaaagggcatggctagagatgtccatagaacactgcacacaattgctcaagagcaaggtccaatggaatcatccgccgcagaagcagcagtcaaaaagttacaagttgaagagagatacttgagagatgtatggtaa

SEQ ID NO: 66 - protein, 683 aa, Papaver somniferum?; identical to SEQ ID NO: 64

SEQ ID NO: 67 - DNA, 2052 bp, Papaver somniferum?
atgggttcgaataatttagctaattcgattgaatcgatgttaggaatatcaataggatcagaatatatttctgacccaattttcattatggtcacaactgtagcttcaatgctgattggatttggtttcttcgcatgtatgaaatcttcgtcttctcaatcaaaacctattgaaacttataaaccaataattgataaagaagaagaggagattgaagttgatcctggtaaaattaagctcactatattttttggtactcagactggtactgctgaaggatttgctaaggcattggcagaagaaattaaggcaaagtacaagaaagcagttgttaaagtagttgacctggatgactatgcagccgaggatgatcaatatgaagagaaattaaagaaagagtctttggtgtttttcatggtagccacttatggtgatggtgagccaactgacaatgctgcgagattttacaaatggttcactcaggaacatgaaaggggagagtggcttcagcaactaacttatggtgtttttggtttgggtaaccgtcaatacgagcatttcaacaagatcgcggtagatgtggatgagcaactcggtaaacaaggtgcaaagcgcattgttcaagtggggctcggtgacgatgatcaatgcattgaagatgattttactgcttggcgagaattgttgtggactgaattggatcagttgctcaaagatgaggatgctgctccttcagtggctacaccgtatattgctactgttcctgaatacagggtagtgattcacgaaactacggtcgcggctctggatgataaacacataaatactgctaacggcgatgttgcatttgatattctccatccttgcagaaccattgttgctcaacaaagagagctccacaaacccaagtctgatagatcctgtatacatctggagttcgacatatcaggctcttcccttacatatgagactggagatcatgttggtgtttatgctgagaactgcgatgaaactgtcgaggaagcagggaagctgttgggtcaacccctggatttgctgttttcaattcacacggataaagaagacgggtcaccccagggaagctcattaccacctcctttcccaggtccttgcaccttacgatctgccctagcacgctatgctgatcttttgaatcctcctagaaaggcttctctgattgctctgtccgctcatgcatctgtacccagtgaagcagagagattgcgctttttgtcatcacctctgggaaagaatgagtattcaaaatgggtagttggaagtcagaggagtcttttggagatcatggccgagtttccatcagcaaaaccccctcttggtgttttctttgctgcagtagcccctcgcttaccgcctcgatactattctatctcatcctctcctaagtttgctccctcaagaattcatgtgacgtgtgctttagtatatggtcaaagccctaccggaagggttcaccgaggagtgtgttcgacatggatgaagcatgcagttcctcaggatagctgggctcctatttttgttcgaacgtcaaacttcaagttaccagctgacccctcaactccaattatcatggtgggacctggtacagggttagctcctttcagaggatttctgcaggaaagaatggccctcaaggaaaatggtgctcaacttggcccagcagtgctctttttcggatgtaggaatcgtaatatggacttcatttatgaagacgaactaaacaacttcgtggaacgaggagtaatttcggagctagttattgccttttcacgtgaaggggaaaagaaggaatatgttcaacataagatgatggagaaagcaacggatgtatggaatgtgatatcaggggacggttatctctatgtgtgtggtgatgccaagggaatggccagagatgtccatcgcacgttgcataccattgcccaagaacagggacccatggaatcatctgctgccgaagctgcagtaaagaaactccaagttgaagaacgatatctaagagatgtctggtga

SEQ ID NO: 68 - protein, 135 aa, Papaver somniferum?
MGGDDKVVFTLAQVSEHNQPKDCWLIIGGKVYDVTKFMEDHPGGDEVLLSATGKDATDDFEDVGHSTSARAMMDEYLVGEVDMDTVPIKQKYTPPKQPQYNQDKTSEFIIKLLQFLVPLAILGLAVGIRFYTKSA

SEQ ID NO: 69 - DNA, 408 bp, Papaver somniferum?
atgggtggtgatgacaaggttgttttcaccttggctcaagtctctgaacataaccaaccaaaggactgttggttgatcatcggtggtaaggtctacgatgttactaaattcatggaagaccatcctggtggtgatgaagttttattgtccgctactggtaaggatgctactgatgatttcgaggatgttggtcactccacttccgccagagccatgatggatgaatacttggtcggtgaggtcgacatggacactgttccaatcaagcaaaagtacactcctccaaagcaaccacaatataaccaagacaagacttctgaattcatcattaagttgttgcaattcttggtccctttggctattttgggtttggccgttggtatcagattctacaccaaatctgcttaa

SEQ ID NO: 70 - protein, 136 aa, Artificial Sequence?
  Synthetic sequence
MASDPKNFVFDDISKHNKTKDCWLIIDGKVYDVTPFMEDHPGGDEVLLAATGKDATDDFEDVGHSDDAREMMHKYYIGEVDKATVPKKRAYVPPADRHYNPDKTQDFIVKILQFLVPLVILGLAFAVRSYTKERSA

SEQ ID NO: 71 - protein, 411 aa, Artificial Sequence?
  Synthetic sequence
ATGGCTTCAGATCCTAAAAACTTCGTCTTCGATGATATTTCAAAACACAACAAAACGAAAGATTGCTGGCTGATTATTGACGGTAAAGTTTATGACGTCACACCTTTTATGGAGGATCATCCTGGCGGTGATGAAGTGCTATTGGCAGCCACCGGTAAGGATGCAACGGATGATTTCGAAGATGTTGGACATTCAGATGATGCCAGGGAGATGATGCATAAATACTACATTGGGGAAGTCGATAAGGCTACCGTTCCAAAGAAAAGGGCTTATGTTCCCCCAGCAGACCGTCATTATAATCCAGACAAGACACAAGACTTTATTGTGAAGATTCTACAATTTCTGGTTCCATTAGTGATCTTAGGATTAGCCTTTGCGGTCAGATCTTATACGAAGGAGAGAAGCGCTTAA

SEQ ID NO: 72 - protein, 286 aa, Papaver bracteatum
METVSKIDQQNQAKIWKQIYGFAESLVLKCAVQLEIAETLHNNVKPMSLSELASKLPVAQPWHHLGDGLTGNCDAFEKALGKSIWVYMSENPEKNQLFNAAMACDTRLVTSALANECKSIFSDGIRTLVDVGGGTGTAVKTISKAFPDIKCTIYDLPHVIADSPEIPNITKISGDMFKSIPSADAIFMKCILHDWNDEECIQILKRCKEALPKDGKVIIVDVVIDMDSTHPYAKIRLTLDLDMMLNTGGKERTKEEWKILFDAAGFASHKVTQISAVQSVIEAYPY

SEQ ID NO: 73 - protein, 343 aa, Sanguinaria canadensis
NKSDQATQAKIWKLIYGFAESLVLKCAVQLEIADTIHNHGKPMTLSELASELPIQPVNSDRLYRVMRYLVHMKLFNKEKSTINGEFKYSLAPPAKFLIKGWEKSMVASILAINDKDFLAPWHHLKDGLVGDCDVFEKALGKSIWVYMSENPEKNQLFNEAMACDTRLVTSALVNNCGNVGIKTLVDVGGGTGTAVKAISKAFPHIKCTIYDLPHVIADSPEIPNIVKIEGDMFKSVPSADAILMKCILHDWNDEECIQILKKCKEAVPREGGKVIIVDVVLNMDSTHPYSKIRFTLDLDMMLNTGGKERTLEEWKKLIDAAGFASFKITQMSTVQSVIEAYPY

SEQ ID NO: 74 - protein, 346 aa, Chelidonium majus
METVSKIDQRNQAKIWKQIYGFAESLVLKCAVQLEIAETLHNNVKPMSLSELASKLPVAQPVNEDRLFRIMRYLVHMELFKIDATTQKYSLAPPAKYLLRGWEKSMVDSILCINDKDFLAPWHHLGDGLTGNCDAFEKALGKSIWVYMSENPEKNQLFNAAMACDTRLVTSALANECKSIFSDGISTLVDVGGGTGTAVKAISKAFPDIKCTIYDLPHVIADSPEIPNITKISGDMFKSIPSADAIFMKCILHDWNDDECIQILKRCKEALPKGGKVIIVDVVIDMDSTHPYAKIRLTLDLDMMLNTGGKERTKEEWKTLFDAAGFASHKVTQISAVQSVIEAYPY

SEQ ID NO: 75 - protein, 346 aa, Stylophorum diphyllum
METVSKIDQQNQAKIWKQIYGFAESLVLKCAVQLEIAETLHNNVKPMSLSELASKLPVAQPVNEDRLFRIMRYLVHMELFKIDATTQKYSLAPPAKYLLRGWEKSMVDSILCINDKDFLAPWHHLGDGLTGNCDAFEKALGKSIWVYMSENPEKNQLFNAAMACDTRLVTSALANECKSIFSDGIRTLVDVGGGTGTAVKTISKAFPDIKCTIYDLPHVIADSPEIPNITKISGDMFKSIPSADAIFMKCILHDWNDEECIQILKRCKEALPKDGKVIIVDVVIDMDSTHPYAKIRLTLDLDMMLNTGGKERTKEEWKILFDAAGFASHKVTQISAVQSVIEAYPY

SEQ ID NO: 76 - protein, 348 aa, Eschscholzia californica
MEGADKIDQATQAKIWKHIYGFAESLVIKSAVELEIADTIHNHGKPMTLSELASKLPVQPVDLDRLYRVMRYLVHMKLFKKQEDEEESIKYSLLPPAKFLIKGWEKSMVSAILLINDKDFMSPWHHLKEGLVNNSNAFDKALGKSIWDYMSANPDKNKVFNEGMACDSRLVSSALVNECGNIFQGIQTLVDVGGGTGTAVKAVSKAFPHIKCSIYDLPHVISDSPDIPNIVKIEGDMFKSIPSADAILMKCILHDWNDEECIEILKKCKEAVPKEGGKVIIVDIVLDMESKHPYSKVRLTLDLDMMLNTEGKERTEEEWKKLIDGAGFASYKITQISALQSVIEAFPY

SEQ ID NO: 77 - protein, 345 aa, Glaucium flavum
TKSDQANQANIWKLIYGFAESLVLKCAIQLEIADTIHNHGEPMSLSELASKLPVQPVNSDRLYRVMRYLVHMKLFNKEKTSINGEFKYSLAPPAKFLIKGWEKSMVASILAINDKDFLAPWHHLKDGLSGDCDAFEKALGKSIWVYMSENPEKNQLFNEAMACDTRLVTSALVNDCQSVFKGINTLVDVGGGTGTAVKAISKAFPHIKCSIYDLPHVIADSPEIPNVVKIEGDMFKAIPSADAILMKCILHDWNDDECIQILKKCKEAVPQEGGKVIIVDVVLNMDLTHPYSKIRLTLDLDMMLNTGGKERTVEEWKKLIDAAGFASFKITEISAVQSVIEAFPY

SEQ ID NO: 78 - protein, 355 aa, Argemone Mexicana
VNKIDQENQSKIWKQIYGFADSLVLKCAVQLEIAETIHNHGKPMSLSELASKLPIQPINLDRLYRVMRYLVHMKLFNKEIITINGDINNTETVIKYSLAPPAKYLIRGWEKSMVASILAINDKDFLAPWHHLKEGLTGNCDAFEKALGKSIWVFMSENPEKNKLFNEAMACDTRLVTSALVNECKNIFCDDGIKTLVDVGGGTGTAMKAISKAFPNINCTIYDLPHVIADSPEIPNITKIAGDMFKSIPSADAILMKCILHDWDDEECIKILKLCKEAVPRKGGKVIIVDVVLNMDMTHPYSKIRLTLDLDMMLNTGGKERTEEEWKKLFDAAGFATYKITQISAVQSVIEAYPY

SEQ ID NO: 79 - protein, 340 aa, Thalictrum flavum
SQAKLWNFIYGFADSLVLKSAVQLDLANIIHNHGTPMTLSELSLRLPSQPVNQDALYRVLRYLVHMKLFTKSSIDGELRYGLAPPAKFLVKGWDKCMLGAILTITDKDFMAPWHYLKEGILNDGSTSTAFEKALGTNIWDYMAEHPEKNQLFNEGMANDTRLIMSALVKECSSIFEGITTLVDVGGGTGTAVRNIAKAFPHIKCTVYDLPHVIADSPGYTEINSVQGDMFKYIPNADAIMMKCILHDWDDKECIEILKRCKDAVPRDGGKVIIIDIILDVKSEHPYTKMRLTLDLDMMLNTGGKERTEEEWKKLIHVAGYKRYKITHISAVQSVIEAYPY

SEQ ID NO: 80 - protein, 345 aa, Hydrastis Canadensis
INKENLSSQAQLWNFIYGFAESLVLKSAVQLDLANIIHNNTKPMTLSELSSHLPIQPVNPDHLYRIMRYLVHMKLFTKSSIDGEIRYGLAPPAKFLVKGYDKCMVGSILAITDKDFMAPWHYLKDGLSGESGTAFEKALGMNIWGYMAEHPEKNQLFNEAMANDTRLIMSALVKECKSIFEGVNTLVDVGGGTGTAVRNIAKAFPHIKCTVYDLPHVIADSPGYSEVTSLEGDMFKYIPNADAIMMKCILHDWDDNECIEILKRSKEAVPKEGGKVIIIDIVLNVQSEHPYTKMRLTLDLDMMLNTGGKERTEEEWKKLIHAAGFSGYKITQISAVQSVIEAYPY

SEQ ID NO: 81 - protein, 345 aa, Nigella sativa
EVENQNLSAQAKLWNYIYGYAETLVLKCAVQLDIANIIHNHGTPISLSDLASLLPNQPVNQDALYRVMRYLVHMELFTKSTSNGETNYSLGPSGKFLVKGWEKCMVDSILVITDDHYMSPWHYLGHGVSSKTSTAFEKVRGTNIWEYLADHPDKSQLFNAGMANDTRLVMSAVVKECKGIFGGVSTLVDVGGGTGTAVKYVAKAFPDIKCTVYDLPHVVADSSSDSGINFVEGDMFTSVPNADAIMMKCILHDWDDDKCVEILKRCKEAVPRDGGKVIIIDIVLDVDFKHPYAKMRLTLDLDMMTIGGKERSEEEWKKLIDGAGYKGCQITQISAVQSVIEAFPY

SEQ ID NO: 82 - protein, 345 aa, Xanthorhiza simplicissima
VKKDSLSSQTKLWNFIYGFAESLVLKCAVHLDIANIIHNNGTSMTLSELSSRLPNQPVNEDALYRVMRYLVHMKLFTKASIDGELRYGLAPPAKFLVKGWDKCMIGSILAITDKDFMAPWHYLKDGLSGESGTAFEKALGMNIWGYMAEHPEKNQLFNEAMANDSRLIMSALVKECGNIFNGITTLVDVGGGTGTAVRNIAKAFPHIKCTVYDLPHVIADSPGYSEVHCVEGDMFKFIPKADAIMMKCILHDWDDKECIEILKRCKEAVPIEGGKVIIVDIVLNVESEHPYTKMRLTLDLDMMLNTGGKERTEEEWKNLIHDAGYKGYKITQITAVQSVIEAYPY

SEQ ID NO: 83 - protein, 341 aa, Berberis thunbergii
QAKLWNIIYAFSDSLVLRCAVELDIANIIHNHGKPMTLSELASVLPVKQPVNSDSLYRVMRYLAHLKVFTKTLDADGETRYGLAPPAKFLVKGNDMCMVGSLMGLTDKDFMAPWQYIKDVLSGDDGKTAFEKALGMDIWEYMGENPEKNKLFNEAMACDTRLVLSALINECKDKFQGINSLVDVGGGTGTAARNLVKAFPHLKCTAYDLPHVIADSPVYPEINQVPGDMFKVIPNADAILMKCILHDWGDKECIEILKKCKEALPKEGGKVIIVDIVLDVKSEHPYTKLRLTLDVDMMLNTGGGKERTEEEWKKLIQAAGFKSYNITQISALQSVIEAFPY

SEQ ID NO: 84 - protein, 342 aa, Mahonia aquifolium
NQAKLWNIIYGFADSLVLRCAVELDIANIIHNHGKSMTLSELASVLPVKQPVNSDSLYRVMRYLAHLRVFTKTLDADGETRYGLAPPANFLVRGNDNCMVGSLMGLTDKEFMAPWHYIKDGLSGDDGKTAFEKALGMDIWEYMGENPEKNKLFNEAMACDTRLVLSALINECKDKFQGLNSLVDVGGGTGTAARNLAKAFPHLKCTAYDLPHVIADSPVYPEITQVPGDMFKVIPYADAILMKCILHDWGDKECIQIVKKCKEALPKEGGKVIIVDIVLDVKSEHPYTKLRLTLDVDMMLNTGGGKERTEEEWKKLIQAAGFKSYNITQISALQSVIEAFPY

SEQ ID NO: 85 - protein, 351 aa, Jeffersonia diphylla
MEAKTGFEISSQANLWNFIYGFSNSLVLRCAVELDIANIIHNHGMPITLSELELLLPVQPVNTASLYRVMRYLAHIKIFTKTLDVDGETRYGLTPSAKFLVKGWDQCTVGAILGITDKDFMAPWHYIKDGLTGDSKKTAFEKALGMDIWKYMGDHPEKNKLFNAAMACDSRLAMSALINECKDKFQEITSLVDVGGGTGTAARNIAQAFPHIKCTVYDLPHVIADSPVYPELNSVAGDMFKCVPNADAIFMKCILHDWDDKECIEILKQCKEAVPKQGGKVIIVDIVLNMKSDHPYTKLRLTLDLDMMLNTGGGKERTEEEWKKLFQAAGFRGYNITQISALQSVIEAFPY

SEQ ID NO: 86 - protein, 350 aa, Menispermum canadense
KQDQAAQAKLWKFIYGFAESLVLKCAIQLDIPDIIHSHGQPMTLTHLASRIPSSQSVDDDRLYRIMRYLVHMKLFTKESGGDDGEDRYGLAPPAKYLVKGWEKSMVPSILCITDKDFMSPWHHLKQGLVDDDEGNHRTAFEKALGVNIWDYMSENPKKNKLFNEAMACDTRLIMSALVNECKEVFEGVQSLVDIGGGTGTAVRNIAKAFPHIHCTVYDLPHVAADSPSYPEVTRVEGDMFKYIPSADAILMKCILHDWADKECIQILKKCKEALPIDGGKVIIVDIVLNVQSEHPYTKMRLTLDLDMMLNTGGKERTEEEWKKLIHAAGFSGYKITQISAVQSVIEAYPY

SEQ ID NO: 87 - protein, 346 aa, Corydalis cheilanthifolia
MEVIKKSDQADQAKLWKFIYGFADSLVLKCAVELEIADTIHKHGEPMTLSELATKLPKQPIDTDRLYRIMRYLVQMKLFTKETSQSGEVKYGLLPPAKFVVRGWQNSMVGSLLAINDKDFIAPWHYLKDGLGGECDAFEKALGKKIWDYMSENPEKNQLFNEAMACDTRLITSALIKDCKDVFKGIKTLVDVGGGTGTAVKAISDAFPDIKCAVYDLPHVIADSPVAPNIDRIEGDMFKSIPNADAIFMKCILHDWNDDECIQILKQCKKALQDGGKVIIVDVVLNVDSKHPYTKMRLTLDLDMMLNTGGKERTEEEWKELFEAAGFSGYKIIQISALQSVIEAYP

SEQ ID NO: 88 - protein, 346 aa, Nandina domestica; identical to SEQ ID NO: 87

SEQ ID NO: 89 - protein, 341 aa, Cissampelos mucronata
KIDQQNQAKIWKQIYGFAESLVLKCAVQLEIAETLHNNVKPMSLSELASKLPVAQPVNEDRLFRIMRYLVHMELFKIDATTQKYSLAPPAKYLLRGWEKSMVDSILCINDKDFLAPWHHLGDGLTGNCDAFEKALGKSIWVYMSENPEKNQLFNAAMACDTRLVTSALANECKSIFSDGISTLVDVGGGTGTAVKAISKAFPDIKCTIYDLPHVIADSPEIPNITKISGDMFKSIPSADAIFMKCILHDWNDDECIQILKRCKEALPKVGKVIIVDVVIDMDSTHPYAKIRLTLDLDMMLNTGGKERTKEEWKTLFDAAGFASHKVTQISAVQSVIEAYPY

SEQ ID NO: 90 - protein, 345 aa, Tinospora cordifolia
KQDQQAQAKIWKFIYGFSESLVLKCAIDLEIPDIIHNHGTPISLSQLSSQIAPAKQPVDSDRLYRIMRYLVHMGLFTEESISGELRYGLAPPAKYLVKGWEKSVVPSLLCINDKDMMSPWHYLKDSTVAGDNRTAFEMALGVNIWDYMGKNPKKNSVFNEAMACDTRLLMSAMVNECKDMFQGIKSLVDVGGGTGTAVRNIAKAFPHIKCTVFDLPHVAADSPVYPEVNRIEGDMFKGIPSADAILMKCILHDWDDKECIEILKKCKEAVPEDGGKVIVVDIVLNAHSDHPYTKMRMVMDLDMMLNCGGKERTEEEWKKLIYAAGFSRYNIRQINAIQSVIEIYP

SEQ ID NO: 91 - protein, 342 aa, Cocculus trilobus
DQAAQAQLWKFIYGFAESLVIKSAIQLDIPDIIDNHGKPITISELASRIPSQGPVDHDRLYRIMRYLVHMKLFTKESIDGEDQYGLAPPAKYLVKGWEKSIVPSILCITDKEFMSPWYHLKEGLSNGDNQTAFEKALGVNIWDYMSKNPKKNNIFNEAMACDTRLLMSALVSECKDMFQGIKSLVDIGGGTGTAVRYIAKAFPHINCTVYDLPHVAADSPTYPEVNRIEGDMFKYIPSADAILMKCILHDWADEECIQILKKCKEALPSTGGKVILVDIVLNAYSEHPYSKMRMVMDLDMMLNCGGKERTEEEWKKLIYAAGFSRYNIRQVNAIQSVIEVYP

SEQ ID NO: 92 - protein, 347 aa, Coptis japonica
MEVKKDNLSSQAKLWNFIYGFAESLVLKCAVQLDLANIIHNSGTSMTLSELSSRLPSQPVNEDALYRVMRYLVHMKLFTKASIDGELRYGLAPPAKYLVKGWDKCMVGSILAITDKDFMAPWHYLKDGLSGESGTAFEKALGTNIWGYMAEHPEKNQLFNEAMANDSRLIMSALVKECGNIFNGITTLVDVGGGTGTAVRNIANAFPHIKCTVYDLPHVIADSPGYSEVHCVAGDMFKFIPKADAIMMKCILHDWDDKECIEILKRCKEAVPVKGGKVIIVDIVLNVQSEHPYTKMRLTLDLDMMLNTGGKERTEEEWKKLIHDAGYKGHKITQITAVQSVIEAYPY

SEQ ID NO: 93 - protein, 366 aa, Artificial Sequence
  Synthetic sequence
  misc_feature (1)..(11): Xaa can be any naturally occurring amino acid
  misc_feature (13)..(15): Xaa can be any naturally occurring amino acid
  misc_feature (17)..(18): Xaa can be any naturally occurring amino acid
  misc_feature (21)..(25): Xaa can be any naturally occurring amino acid
  misc_feature (28)..(30): Xaa can be any naturally occurring amino acid
  misc_feature (32)..(33): Xaa can be any naturally occurring amino acid
  misc_feature (35)..(51): Xaa can be any naturally occurring amino acid
  misc_feature (53)..(57): Xaa can be any naturally occurring amino acid
  misc_feature (59)..(132): Xaa can be any naturally occurring amino acid
  misc_feature (135)..(152): Xaa can be any naturally occurring amino acid
  misc_feature (154)..(157): Xaa can be any naturally occurring amino acid
  misc_feature (159)..(160): Xaa can be any naturally occurring amino acid
  misc_feature (163)..(168): Xaa can be any naturally occurring amino acid
  misc_feature (170)..(170): Xaa can be any naturally occurring amino acid
  misc_feature (172)..(174): Xaa can be any naturally occurring amino acid
  misc_feature (177)..(178): Xaa can be any naturally occurring amino acid
  misc_feature (181)..(181): Xaa can be any naturally occurring amino acid
  misc_feature (183)..(183): Xaa can be any naturally occurring amino acid
  misc_feature (186)..(187): Xaa can be any naturally occurring amino acid
  misc_feature (190)..(193): Xaa can be any naturally occurring amino acid
  misc_feature (195)..(205): Xaa can be any naturally occurring amino acid
  misc_feature (209)..(209): Xaa can be any naturally occurring amino acid
  misc_feature (217)..(222): Xaa can be any naturally occurring amino acid
  misc_feature (226)..(228): Xaa can be any naturally occurring amino acid
  misc_feature (230)..(232): Xaa can be any naturally occurring amino acid
  misc_feature (238)..(239): Xaa can be any naturally occurring amino acid
  misc_feature (242)..(251): Xaa can be any naturally occurring amino acid
  misc_feature (256)..(258): Xaa can be any naturally occurring amino acid
  misc_feature (260)..(260): Xaa can be any naturally occurring amino acid
  misc_feature (265)..(265): Xaa can be any naturally occurring amino acid
  misc_feature (274)..(274): Xaa can be any naturally occurring amino acid
  misc_feature (276)..(277): Xaa can be any naturally occurring amino acid
  misc_feature (279)..(280): Xaa can be any naturally occurring amino acid
  misc_feature (282)..(282): Xaa can be any naturally occurring amino acid
  misc_feature (284)..(285): Xaa can be any naturally occurring amino acid
  misc_feature (287)..(287): Xaa can be any naturally occurring amino acid
  misc_feature (289)..(293): Xaa can be any naturally occurring amino acid
  misc_feature (298)..(299): Xaa can be any naturally occurring amino acid
  misc_feature (301)..(308): Xaa can be any naturally occurring amino acid
  misc_feature (312)..(312): Xaa can be any naturally occurring amino acid
  misc_feature (314)..(314): Xaa can be any naturally occurring amino acid
  misc_feature (316)..(318): Xaa can be any naturally occurring amino acid
  misc_feature (320)..(320): Xaa can be any naturally occurring amino acid
  misc_feature (324)..(328): Xaa can be any naturally occurring amino acid
  misc_feature (333)..(334): Xaa can be any naturally occurring amino acid
  misc_feature (339)..(339): Xaa can be any naturally occurring amino acid
  misc_feature (341)..(343): Xaa can be any naturally occurring amino acid
  misc_feature (346)..(349): Xaa can be any naturally occurring amino acid
  misc_feature (352)..(357): Xaa can be any naturally occurring amino acid
  misc_feature (363)..(364): Xaa can be any naturally occurring amino acid
  misc_feature (366)..(366): Xaa can be any naturally occurring amino acid
XXXXXXXXXXXQXXXWXXIYXXXXXLVXXXAXXLXXXXXXXXXXXXXXXXXLXXXXXPXXXXXXXXXXXXXXXXXXXXXXXXXXXXXXXXXXXXXXXXXXXXXXXXXXXXXXXXXXXXXXXXXXXXXXXXXXPWXXXXXXXXXXXXXXXXXXFXXXXGXXIWXXXXXXPXKXXXFNXXMAXDXRLXXSAXXXXCXXXXXXXXXXXLVDXGGGTGTAXXXXXXAFPXXXCXXXDLPHVXXDSXXXXXXXXXXGDMFXXXPXADAIXMKCILHDWXDXXCXXIXKXXKXAXXXXXGKVIXXDXXXXXXXXHPYXKXRXXXDXDMMXXXXXGKERXXEEWKXLXXXAGXXXXKIXXXXXXQSVIEXXPX

SEQ ID NO: 94 - protein, 351 aa, Papaver bracteatum
MQLMAKEELLRNMELGLIPDQEIRQRIRIELEKRLQWGYKETHEEQLSQLLELVHSLRGMKMATEMENLDLKLYEAPMEFLKIQHGSNMKQSAGYYTDESTTLDEAEIAMLDLYMERAQIKDGQSVLDLGCGLGAVALFGANKFKNCQFTGVTSSMEQKDYIERKCKELKLTNVKVLLADITTYETEERFDRIFAVELIEHMKNYQLLLKKISEWMKDDGLLFVEHVCHKTLAYHYEPVDAEDWYTNYVFPAGTLTLSSASMLLYFQDDVSVVNQWTLSGKHYSRSHEEWLKNMDKNIVKFKEIMKSITKTEEEANKLLNFWRIFCMCGAELFGYKNGEEWMLTHLLFKKK

SEQ ID NO: 95 - protein, 345 aa, Sanguinaria canadensis
ELLKRLESGLVSDEELRGLIRFELERRLRWGYKPTHEQQLAQLLNLAHSMKQMKIATEIDALNSTMYEVPIPFLQIQLGSTLKESCCYFKDESTTVDEAEIAMMDLYLERAQIKDGQSILDLGCGLGALAFHIAQKYTNCNITAITNSVRQKEFIEEKCKILNVSNVKVSLADICTLEMEATFDRIFAIGLIEHMKNYELLLKKFSEWMKQDGLIFIEHLCHKTLAYHYEPLDEDDWYTEYFFPAGTLTLISSSFLLYFQDDVSVVDHWTLSGKHFSRSNEEWLKRMDEKIDEVKEIFESVSDSKDDDVTKLINHWRFFCISSAEMFGYNNGEEWMISQVLFKKK

SEQ ID NO: 96 - protein, 351 aa, Chelidonium majus
MQLMAKEELLQNMELGLIPDQEIRQLIRVELEKRLQWGYKETHEEQLSQLLDLVHSLKGMKMATEMENLDLKLYEAPMEFLKIQHGSNMKQSAGYYTDESTTLDEAEIAMLDLYMERAQIKDGQSVLDLGCGLGAVALFGANKFKKCQFTGVTSSVEQKDYIQGKCKELKLTNVKVLLADITTYETEERFDRIFAVELIEHMKNYQLLLKKISEWMKDDGLLFVEHVCHKTLAYHYEPVDAEDWYTNYVFPAGTLTLSSASMLLYFQDDVAVVNQWTLSGKHYSRSHEEWLKNMDKNIVEFKEIMRSITKTEEEANRLLNFWRIFCMCGAELFGYKNGEEWMLTHLLFKKK

SEQ ID NO: 97 - protein, 350 aa, Chelidonium majus
QQAKKEELLERMELGLVPDEEIRNLIRIELEKRLNWGYKPTHQQQLSQLLNLVHVLRKMKIATEMESLDSKLYEAPFSFLRIKLGSTMKESCSYFKDESTTLDEAEIAMLDLYIERAQIKDGQSVLDLGCGLGAVTLHVAKKYKNCNVTGITNSVEQKDFIDGKCKELKLSNVKVILSDVTTHEMEDKFDRIFAIELIEHMKNYELLLRRISNWMKDDGLLFIEHVCHKTLAYHYEPIDEDDWFTEYIFPAGTLTLSSASLLLYFQDDVSVVNHWTLSGKHFSCTHEEWLKRIDGNIDAVKEIMKSITKNEEEAVKLINFWRIFCMCGGELFGYKNGEEWMMSHILFKKK

SEQ ID NO: 98 - protein, 351 aa, Stylophorum diphyllum
MQLMAKEELLRNMELGLIPDQEIRQRIRIELEKRLRWGYKETHEEQLSQLLELVHSLRGMKMATEMENLDLKLYEAPMEFLKIQHGSNMKQSAGYYTDESTTLDEAEIAMLDLYMERAQIKDGQSVLDLGCGLGAVALYGANKFKNCQFTGVTSSMEQKDYIERKCKELKLTNVKVLLADITTYETEERFDRIFAVELIEHMKNYQLLLKKISEWMKDDGLLFVEHVCHKTLAYHYEPVDAEDWYTNYVFPAGTLTLSSASMLLYFQEDVSVVNQWTLSGKHYSRSHEEWLKNMDKNIVKFKEIMKSITKTEEEANKLLNFWRIFCMCGAELFGYKNGEEWMLTHLLFKKK

SEQ ID NO: 99 - protein, 332 aa, Stylophorum diphyllum
PYDEIRRLMRIELGRRLQWGYKPTHEEQLAQVIKLARSLRSMNIATEIDTLDEQMYEVPIPFLQLMFGSTIKGSCCYFKDESTTLDEAEIAMLDLYCDRAQIQDGQSVLDLGCGQGALTLHVANKYKNCRVTAVTNSVSQKEFIEEKSRKLNLKNVEVMLADITTHEMEDTFDRILVIELFEHMKNYELLLRKISKWMSNDGLLFIEHICHKTFAYHYEPLDEDDWYTEYIFPAGTMIIPSASFFLYFQDDLSVVNQWTLSGKHFARTKEQWLKRLDANVDEVMKIMESFSGSKEGAVKWTNYWRGFCLSGMEMYGYNNGEEWMASHVLFKK

SEQ ID NO: 100 - protein, 341 aa, Eschscholzia californica
KEELLKSMELGLVPDEDIRKHIRSQLEKRLKWGYKPNHEQQLAQLLDVIHSLKKMKISKEYESFDLRLYEAPFDFHKIQLGTHLKESCSYYKDESTTLDEAEGAMLDLYTQKAKIEDGQSILDLGCGVGAVTLFVANKYKNCKVTGITSCQWQKDFIENKCKELNLTNVRVIIGDVTAYEMEETFDRIFAIELIEHMKNYELLLRKISKWMKDDGLLFIEHVCHKILAYPYEPIDEEDWFTEYIFPGGTLTLSSASLLLYFQDDVSVVEHSSLNGKHYSRSHGEWLKNIDANIDEVKGIMRSITKTEEEAVRLVNFWRIFCMCGIELFGYNNGEEWMVSHI

SEQ ID NO: 101 - protein, 350 aa, Glaucium flavum
QVKKKEELLKNMELGLVPDEEIRRLIRIELEKRLKWGYKPTHQQQLAQLLDLVHSLKKMKIATEMESLDLKLYEAPFSFVQIKHGSTIKESSSYFKDESMTLDEAEIAMLDLYVERAQIEDGQSVLDLGCGLGAVTLHVAKKYKNCHVTGLTNSVEQKDFIEGKCKELNLSNVKVILADVTSHEMEDKFDRIFAVELIEHMKNYELLLRRISKWMKDDGLLFIEHVCHKTFAYHYEPIDEDDWYTEYIFPAGTLTLSSASLLLYFQDDVSVVNHWTLSGKHYSRSHEEWLKRIDGNMDAVKEIMKSITKTEEEAVKLINFWRIFCMCGAELFGYKDGEEWMMSHVLFKKK

SEQ ID NO: 102 - protein, 349 aa, Argemone Mexicana
QLKKEDLLKNMELGLIPDEEIRKLIRVQLEKRLNWGYKSTHEQQLSQLLHLVHSLKKMKIATEMENLDLKLYEAPFSFVQIQHGSTIKESSGLFKDESTTLDEAEIAMLDLYTKRAKIEDGQSVLDLGCGLGAVTLYVAQKFKNCYVTGITSSVEQKDFIEGRCKELKLSNVKVILADITTYETEEKYNRIFAVELIEHMKNYELLLRKISEWMKQDGLLFIEHVCHKTLAYHYEPLDEEDWYTNYIFPAGTLTLSSATLLLYFQDDVAVVDQWTLSGKHYSRSHEEWLKRIDGNIEEVKEIMKSITKSEEEAKKLLNFWRIFCMCGAELFGYKNGEEWMMTHILFKKK

SEQ ID NO: 103 - protein, 342 aa, Corydalis cheilanthifolia
DLLKRLEAGLVPDDEIRSLIRVELERRLKWGYKSTHQEQLDQLLNLAHSIKKMKIASTEMDGLTSTMYEVPISLVQIQLGSHLKESCLYFKDETTTVDEAEIAMMDLYLERAQIKDGQSILDLGCGLGAVSFHIAQKYTSCNITAVTNSVRQKEFIEEKSKTLNVPNVKVLLADITTLEMEHTFDRLFAISLIEHMENYELLLRKLSEWMKQDGLLFIEHLCHKTLSYHFEPMDEDDWYTNLLFPAGTLTLVSASFLLYFQDDLSVVNQWVMSGKHFSRANEEWLKNMDAKMDEMREIFESITDSEEEVVKLINHWRIFCISSAEMFAYNDGEEWMNSHVLF

SEQ ID NO: 104 - protein, 351 aa, Thalictrum flavum
MIVGGKQELFKKLELGLIPNDEVKKLMRIQLARRLQWGYKSTYEEQIAQVIDLTHSLRHMNIAMEVDTLDSNMYEVPLDFLKIMNGSALKMSSCYFKDDSTTLDEAEIAMMDLHCERAQIKDGHSVLDLGCGHGSLTFYVAQKYKKSHVTAVTNSVSQKEYIEEEARRRNLSNVEVLLADIATHEMADTYDRILVVGLFEHMKNYGLLLKKISEWMAKDGLLFVQHVCHKTFAFHCEPIDEDDWLSEYAFPAGTMIIPSASFFLYFQDDVSVVNHWTLSGKHFSRTTEEWLKRLDANVKVIIPMFATITGSEEEAVKLLNYWRGLCFFGVELYGYNNGEEWMESHVLFKKK

SEQ ID NO: 105 - protein, 334 aa, Hydrastis Canadensis
VPYDEIKKLIRIQLERRLQWGYKSTYEEQVADVLDLAHALRKMTIAREVETLDSQLYEVPVEFLKIMNGNTLKGSCCYFKDDSTTLDEAEIEMLDLYCERAQIKDGQSVLDLGCGQGALTLHVAQKYKNCRVTAVTNSVSQKEYIEEQSRNQNLSNVEVILADITTHKMDDRFDRILIIELFEHMKNYELLLRKITEWMAQDGLLFVEHICHKTFAYHYEPLDEDDWFTEYVFPAGTMIIPSASFFLYFQDDVSVVNHWTLSGKHFSRTNEEWLKRLDANIDTIKPMFESLTGSEEEAMKLINYWRGFCLSGMEMFGYKNGEEWMASHLLFNKK

SEQ ID NO: 106 - protein, 344 aa, Nigella sativa
ELLKKLEQGLVPYDEIKRLMRVELEKRLQWGYKPTYEQQLAHLLQLAHSLRHMSIAHEVDTLDSQLYEVPIEFLKIINGSRLKGSCCYFENDSTSLDEAEVAMLELYCERAQIKDGQSVLDLGCGQGALTLYFAQKYKNCRVTAVTNSVSQKEYIEEESKKGGLTNVEVVLADITTHEMAHKYDRILIIELFEHMKNYELLLRKISKWMAKDGLLFVEHICHKTFAYHYEPLDEDDWFTEYVFPAGTMIIPSASFFLYFQDDVSVVNHWTLSGKHFSRTNGEWFNRIDANLDVIKPMFEALTGSKEEAMKLINYWRGFCLSGMEMFGYKDGEEWMASHVLFKRK

SEQ ID NO: 107 - protein, 334 aa, Xanthorhiza simplicissima
VPYDDIKQLIRSELARRLQWGYKPTYEEQIAEIQNLTHSLRQMKIATEVDTLDSQLYEIPIEFLKIMNGSNLKGSCCYFKEDSTTLDEAEIAMLDLYCERAQIQDGQSVLDLGCGQGALTLHVAQKYKNCRVTAVTNSVSQKEYIEEESRRRNLLNVEVTLGDITTHEMAETYDRILVIELFEHMKNYELLLRKISEWIAKDGLLFLEHICHKTFAYHYEPLDDDDWFTEYVFPAGTMIIPSASFFLYFQDDVSVVNHWTLSGKHFSRTNEEWLKRLDANLDVIKPMFETLMGNEEEAVKLINYWRGFCLSGMEMFGYNNGEEWMASHVLFKKK

SEQ ID NO: 108 - protein, 346 aa, Berberis thunbergii
KVELLKKFENGLVPDHEIRQLIRGQLERRLQWGYKPTYEEQIAQLLDLAQSLRKLKIADEVETLDSQLYEVPIAFLRIMNGAMLKGSGCYFKDDSTTLDEAEIAMLDLYCERAQIEDGQSVLDLGCGQGAFTLHVAQKFKKCRVTAITNSVAQKEFIEDQAKKSNLSNVKVMLADITKHETNDTFDRIVVIELFEHMKNYELLLRKISKWMSKDGFLFIEHICHKTFAYHYEPVDEEDWFTTFVFPAGTMLIPSASFFLYFQDDVSVVKHWTLSGKHFSRSNESWLKRIDANLDTVKAIFESFLGNKEAATKYLNYWRGFCLSGMEMFGCNNGEEWMTTHLLLKKK

SEQ ID NO: 109 - protein, 328 aa, Jeffersonia diphylla
VPDNEIKKLIGIQLERRLKWGYKPIYEQQIAQVLNLAHSLQNMNIADEIETLDEHMYEVPISFLKIMNGSMLKGSSSYFRDDSMTLDEAEIAMLDLYCERAQIKDGQSVLDLGCGQGALTLHVAQKYKNCHVTAITNSVSQKEYIEDQCKSCNLSNVEVILADITKHESDETYDRILVIELFEHMKNYALLLRKISKWISKDGLLFVEHICHKTFAYHYQPLDEDDWFTDFVFPAGTMIIPSASFLLYFQDDVSVVNHWTLSGKHFSRTNKEWLKRLDAEIDTVKEIFKSSLGTEEAAVKFINYWRGFCFSGMELFGYNNGEEWMTSH

SEQ ID NO: 110 - protein, 347 aa, Nandina domestica
KNKAELIKKLELGLVPYDEIKRLMGIEMERRLRWGYKPTHQEQLAQLLNLAHSLRKMKIADEVETLDSQMYEVPISFLRIMNGSRLKGSCSYFRDDSTTLDEAEVAMLDLYCERAQIKDGQSVLDLGCGQGALTLHVAQKYKKCRVTAITNSISQKKYIEDQCKYNNLLNVEVILADITKHETNDTFDRIMVIELFEHMKNYELLLRKISQWMSQDGFLFIEHICHKTFAYHYEPLDEDDWFTDYVFPAGTMIIPSASFFLYFQDDLSVINHWTLSGKHFSRTNEEWLKRLDANVDTVKAIFEESLGSEEAAMKFINYWRGFCLSGITMFGYNNGEEWMTSHLLLKK

SEQ ID NO: 111 - protein, 345 aa, Menispermum canadense
ELLKKLELGVVPDEEIKHLVRIQLERRLEWGYKSTYEQQISHVLNLVHSLRQMSIMTEEVETFDSEFYELPISFWKIKLGRAMKQSCCYFKDELTTLDEAEEAMLELYCERAQIEDGQRVLDLGCGYGSLTLYIARKYPNCHVTGLTNSISQKQFIEEQCKDSNLSNVNIILVDVATHETDETFDRIMVVGLLEHMKNYELFLRKLLKWMKQDGFLFIDHVCHKALAYIYEPVDEDDWLPECTFPSGTIVIPSAHFLLYFQDDASVVNHWIINGKNYRRTSEEWLKRIDANANALKAIMGSVSRKEDEAVRLTNYWRTLLLFHIELFKYNNGEEWMVAHILFKKK

SEQ ID NO: 112 - protein, 346 aa, Cissampelos mucronata
KAELLRKLELGQVPYDEIKRLIKVELDRRIQWGYKPTFEQQTADVLSFAHSLRKLNIATAVDTLDSEMYEVPISFLKIMFGNTIKGSCCYFKDDSVTLDEAEIAMLDLYCERSQIKDGQRVLDLGCGQGALTMHVARKFRNCHVTGITNSVSQKEYIEEQCKINNLMNVEIKLADITTHEMEDRYDRILVIELIEHMKNYELLLRKISEWLTPDGLLFIEHICHKTFPYHYEPLDEDDWFTEYIFPAGTMIIPSANFLLYFQDDVTVVNHWTLSGKHYSRTHESWLKNIDANAEAVKKIMVSFTGSEDAALKQMNYWRGFNLSGMELYKYRNGEEWMASHVLFKKK

SEQ ID NO: 113 - protein, 344 aa, Tinospora cordifolia
EAILKKLELGLIPDGEIRKMIRVELERRLEWGYKPTHEQQTAEVVNFAQSLRKLSIAMEMDTLDTEMYEVPISFLKIMFGNTIKGSCCYFKDENTTLDEAEVAMLDLYCERSQIKDGQRVLDLGCGQGALTMHVARKYKNCYVTGITNSVSQKEYIEEQCRINNLPNVEVILADITTHETEDKFDRILVIELIEHMKNYELLLRKFSQWLTPDGFLFIEHICHKTLAYQYDPVDEDDWFTEYVFPSGTMIVPSANFLLYFQDDVTVVNHWTLSGMNYSRTHEAWLKNIDANAEAVKEIMVSFTGSEEAAVKQMNYWRGFNLSGMELYKYKNGEEWMACHILFKK

SEQ ID NO: 114 - protein, 344 aa, Cocculus trilobus
  misc_feature (74)..(74): Xaa can be any naturally occurring amino acid
ELLRKLELGHVPDDEIKRLIKVELDRRIQWGYKPTYEQQTADVVNFAHSLRKMSIATEMDTLDSEMYEVPISFXKLMFGSTIKASCCYFKDDSTTLDEAEIAMLDLYCERSQIKDGQRLLDLGCGQGALTMHVGRKYKNCRVTGVTNSVSQKEYIEEQCKINNLTNVDVILADITTHVMDDRYDRILVIGLFEHMKNYELLLRKMSEWMTPEGLLFIEHACHKTFAYHYEPLDEDDWFTEYIFPSGTMIIPSANFLLYFQDDVALVNHWTLSGKHYSHTHEWWLKNIDANAEAVKKIMESFTGSEEAAVKQLNYWRGFNLSGMELFKYRNGEEWMASHVLFKKK

SEQ ID NO: 115 - protein, 347 aa, Artificial Sequence
  Synthetic sequence
  misc_feature (1)..(33): Xaa can be any naturally occurring amino acid
  misc_feature (35)..(36): Xaa can be any naturally occurring amino acid
  misc_feature (41)..(45): Xaa can be any naturally occurring amino acid
  misc_feature (47)..(74): Xaa can be any naturally occurring amino acid
  misc_feature (77)..(77): Xaa can be any naturally occurring amino acid
  misc_feature (79)..(86): Xaa can be any naturally occurring amino acid
  misc_feature (88)..(90): Xaa can be any naturally occurring amino acid
  misc_feature (92)..(92): Xaa can be any naturally occurring amino acid
  misc_feature (94)..(104): Xaa can be any naturally occurring amino acid
  misc_feature (109)..(110): Xaa can be any naturally occurring amino acid
  misc_feature (112)..(113): Xaa can be any naturally occurring amino acid
  misc_feature (115)..(120): Xaa can be any naturally occurring amino acid
  misc_feature (122)..(122): Xaa can be any naturally occurring amino acid
  misc_feature (125)..(127): Xaa can be any naturally occurring amino acid
  misc_feature (134)..(134): Xaa can be any naturally occurring amino acid
  misc_feature (136)..(143): Xaa can be any naturally occurring amino acid
  misc_feature (145)..(150): Xaa can be any naturally occurring amino acid
  misc_feature (152)..(153): Xaa can be any naturally occurring amino acid
  misc_feature (155)..(158): Xaa can be any naturally occurring amino acid
  misc_feature (161)..(162): Xaa can be any naturally occurring amino acid
  misc_feature (164)..(173): Xaa can be any naturally occurring amino acid
  misc_feature (176)..(180): Xaa can be any naturally occurring amino acid
  misc_feature (182)..(192): Xaa can be any naturally occurring amino acid
  misc_feature (194)..(198): Xaa can be any naturally occurring amino acid
  misc_feature (200)..(200): Xaa can be any naturally occurring amino acid
  misc_feature (204)..(204): Xaa can be any naturally occurring amino acid
  misc_feature (207)..(207): Xaa can be any naturally occurring amino acid
  misc_feature (209)..(209): Xaa can be any naturally occurring amino acid
  misc_feature (211)..(215): Xaa can be any naturally occurring amino acid
  misc_feature (217)..(220): Xaa can be any naturally occurring amino acid
  misc_feature (222)..(223): Xaa can be any naturally occurring amino acid
  misc_feature (225)..(226): Xaa can be any naturally occurring amino acid
  misc_feature (228)..(228): Xaa can be any naturally occurring amino acid
  misc_feature (232)..(238): Xaa can be any naturally occurring amino acid
  misc_feature (240)..(240): Xaa can be any naturally occurring amino acid
  misc_feature (242)..(243): Xaa can be any naturally occurring amino acid
  misc_feature (246)..(250): Xaa can be any naturally occurring amino acid
  misc_feature (253)..(253): Xaa can be any naturally occurring amino acid
  misc_feature (256)..(259): Xaa can be any naturally occurring amino acid
  misc_feature (261)..(264): Xaa can be any naturally occurring amino acid
  misc_feature (269)..(269): Xaa can be any naturally occurring amino acid
  misc_feature (271)..(280): Xaa can be any naturally occurring amino acid
  misc_feature (282)..(290): Xaa can be any naturally occurring amino acid
  misc_feature (292)..(295): Xaa can be any naturally occurring amino acid
  misc_feature (297)..(321): Xaa can be any naturally occurring amino acid
  misc_feature (323)..(323): Xaa can be any naturally occurring amino acid
  misc_feature (326)..(339): Xaa can be any naturally occurring amino acid
  misc_feature (345)..(347): Xaa can be any naturally occurring amino acid
XXXXXXXXXXXXXXXXXXXXXXXXXXXXXXXXXRXXWGYKXXXXXQXXXXXXXXXXXXXXXXXXXXXXXXXXXXYEXPXXXXXXXXGXXXKXSXXXXXXXXXXXDEAEXXMXXLXXXXXXIXDGXXXLDLGCGXGXXXXXXXXKXXXXXXTXXTXXXXQKXXIXXXXXXXXXXNVXXXXXDXXXXXXXXXXXRXXXXXLXEHMXNYXLXLXXXXXWXXXXGXXFXXHXCHKXXXXXXXPXDXXDWXXXXXFPXGTXXXXSXXXXLYFQXDXXXXXXXXXXGXXXXXXXXXWXXXXDXXXXXXXXXXXXXXXXXXXXXXXXXNXWRXXXXXXXXXXXXXXGEEWMXXX

SEQ ID NO: 116 - protein, 355 aa, Papaver bracteatum
MGSLAKPAETQEVSIKDQAQLWNIIYGFADSLVVRCAVEIGIADIIKNNDGAITLAQLASKLPVPNVSSDYLYRMVRYLVHLNILAQETCNGGVEKVYSLKPVGTLLLRDAERSMVPMILGMTEKDFMVSWHFMKEGLGNGSTTAFEKGMGMDIWKYLESNPDQSQLFNEGMAGETRLLTKTLIEDCRDTFQGLDSLVDIGGGNGTTIKAIHEAFPHIKCSLYDLPHVVANSHDLPNIEKVPGDMFKSVPSAQAILLKLILHDWTDEECVNILKKCKEAIPKETGKVIIVDVALEEESNHELTKTRLILDIDMLVNTGGRERTADDWENLLKRAGFRSHRIRPIRAIQSVIEAFP

SEQ ID NO: 117 - protein, 344 aa, Sanguinaria canadensis
SQEVDIKAQAHLWSIIYGFADSLVLRCAVEIGIADIIKNNNGSISVTELSSKLPISNVNSDNLYRVLRYLVHMGILKEDSDNNGVKLYSLQPVATLLLRDAERSMVPIILGMTQKDFMVPWHFMKEGLGNGGTAFEKGMGMTIWQYLEGHPEQSQLFNEGMAGETRLLTKSLIEGCKDTFEGLTSLVDVGGGNGTTIKAIYDAFPHIKCSVYDLPHVIASSHDLPNIERIPGDMFKSIPSAQAILLKLILHDWTDEECVNILKKCKEAVPKETGKVIIVDVALEEESQHELTKTRLILDIDMLVNTGGRERTEDDWEKLLKRAGFRGHKIRHIAAIQSVIEAFP

SEQ ID NO: 118 - protein, 357 aa, Chelidonium majus
MGSLDAKPAAATQEVSIKDQAQLWNIIYGFADSLVLRCAVEIGIADIIKNNDGAITLAQLAAKLPITNVSSDYLYRMVRYLVHLNIIEQETCNGGVEKVYSLKPVGTLLLRDAERSMVPMILGMTQKDFMVSWHFMKEGLGNGSTTAFEKGMGMDIWKYLEGNPDQSQLFNEGMAGETRLLTKTLIEDCRDTFQGLDSLVDIGGGNGTTIKAIYEAFPHIKCTLYDLPHVVANSHDLPNIEKVPGDMFKSVPSAQAILLKLILHDWTNEECVNILKKCKEAIPKETGKVIIVDVALEEESNHELTKTRLILDIDMLVNTGGRERTADDWENLLKRAGFRSHKIRPIRAIQSVIEAFP

SEQ ID NO: 119 - protein, 347 aa, Stylophorum diphyllum
AVSQEVDIKAQAHLWNIIYGFADSLVLRCAVEIGIADIIKNNNGSISVSELSSKLPISNVNSDNLYRVLRYLVHMGILKEDSDINGVKLFSLQPVATLLLRDAERSMVPIILGMTQKDFMVPWHFMKEGLGDGSTAFEKGMGMTIWQYLEGHPEQSQLFNEGMAGETRLLTKSLIEGCSRDTFEGLTSLVDVGGGNGTTIKGIYDAFPQIKCSVYDLPHVIASSPEHPNIERIPGDMFKSVPSAQAILLKLILHDWTDEECVNILTKCREAVPKETGRVIIVDVALEEESQHELTKTRLILDIDMLVNTGGRERTEDDWEKLIKRAGFRGHKIRHIAAIQSVIEAFP

SEQ ID NO: 120 - protein, 346 aa, Eschscholzia californica
AVSQEVDIKAQAHLWNIIYGFADSLVLRCAVEIGIADIIKNNNGSISVSELSSKLPISNVNSDNLYRVLRYLVHMGILKEDSDINGVKLYSLQPVATLLLRDAERSMVPIILGMTQKDFMVPWHFMKEGLGDGSTAFEKGMGMTIWQYLEGHPEQSQLFNEGMAGETRLLTKSLIEGCRDTFEGLTSLVDVGGGNGTTIKGIYDAFPQIKCSVYDLPHVIASSPEHPNIERIPGDMFKSVPSAQAILLKLILHDWTDDECVNILTKCREAVPKETGRVIIVDVALEEESQHELTKTRLILDIDMLVNTGGRERTEDDWEKLLKRAGFRGHKIRHIAAIQSVIEAFP

SEQ ID NO: 121 - protein, 353 aa, Glaucium flavum
MGVSDNKPESQEVDIKAQAHLWNIIYGFADSLVLRCAVEIGIADIIKSNNGSISVTELASKLPITNVNSDNLYRVLRYLVHMGILKEVSDSNEVKLYSLQPVATLLLRDAERSMVPIILGMTQKDFMIPWHFMKEGLGNDTTAFEKGMGMTIWQYLEGHPEQSNLFNEGMAGETRLLTKSLIDGCRDTFEGLTSLCDVGGGNGTTIKGIYDAFPQIKCSVYDLPHVIASSPEHPNIERIPGDMFKSVPSAQAILLKLILHDWTDEECVNILIKCREAVPKDTGKVIIVDVALEEESQHELTKTRLILDIDMLVNTGGRERSEDDWEKLLKRAGFRGHKIRHIAAIQSVIEAFP

SEQ ID NO: 122 - protein, 347 aa, Argemone Mexicana
NQEVDIKDQAHLWNIIYGFADSLVLRCAVEIGIADIIKNNNGSISVSELASKLPISNVNSDNLYRILRYLVHMSILKEETSSDINGGNKLYSLQPVGTLLLRDAERSMVPMILGMTQKDFMIPWHFMKEGLGNGETAFEKGMGMTIWEYLEGHPDQSQLFNEGMAGETRLLTKSLINGCRDIFEGLNSLVDVGGGNGTTIRAIYNAFPHIKCKLYDLPHVIANSLDQPNIECIPGDMFKFVPTAQAILLKLILHDWTDEECVNILKKCKEAIPKETGKVIIVDVALEEESKHELTKTRLILDIDMLVNTGGRERTADDWENLLKRAGFRSHKIRSIAAIQSVIEAYP

SEQ ID NO: 123 - protein, 343 aa, Corydalis cheilanthifolia
AEVQDVDLKAQAHLWNIIYGFADSLVLRCAVELGIADIINSNNGPVTISEIASKLPVDNVNTDNLYRVLRYLVYMGLLKESQNKCYSLEPVATLLLKDAQRSMVPIILGMTQKDFMVPWFFMKEGLGSGSSTAFEKGMGMTLWEYLEGHPDQSQLFNEGMAGETRFLTSSLINGCRDTFEGLTSLVDVGGGNGTTIKGIHDAFPHIKCSVYDLPHVIANAHPHPNIERIPGDMFKSVPSAQAILLKLILHDWTDEESVNILKRCREAVPKEGGKVIIVDVALEEGSQHELTKTRLILDIDMLVNTGGRERSVDDWDRMLKLAGFSSHKIRHIAAIQSVIEAFP

SEQ ID NO: 124 - protein, 340 aa, Thalictrum flavum
ESVDINAQAHVWKIIYGFADSLVLRCAVELGIFDIIDNNNQPITLADLASKLPISNVNLDNLFRILRYLVKMEILSYAGVNKYALEPIAKLVLRNEKRSMVPMVLGMTQKDFMTPWHSMKDGLTDNGVTAFEKAMGMTIWEYLEGHPDQSQLFNEGMAGETRLLTSSLISGSKDLFQSIDAVVDVGGGNGTTIKAISDAFPHIKCTLFDLPHVIANSYDHPNIERIGGDMFKGMPSAQAILLKLILHDWNDEDSIKILKQCRKAVPKDGGRVIIVDVALDEDSDHELSSTRLILDIDMLVNTGGKERTKEDWEKLVKCAGFSGCKIRHIAAIQSVIEIFP

SEQ ID NO: 125 - protein, 353 aa, Hydrastis Canadensis
MDANGNKDHESSDIKSQAHLWKIIYGFADSLVLRCAVELEIFDIIDNNNQPITVSELASKLPIADVNSDNLYRILRYLVQMKILKLNKVVDDGVNKYSLQPIAALLLRNSKRNMVPIILGMTQKDFMTSWHSMKDGLSNNGTAFEKGMGMTIWEYLEGHPEQSQLFNEGMAGETRLLTSSLISGSKDMFQSIHSLVDVGGGNGTTIKAISDAFPHIKCTLFDLPHVIANAYDHPNIERIPGDMFKSMPSAQAILLKLILHDWSDEDCIKILKSCKEAVPKDGGKVIIVDVALDEESDHELTSTRLILDIDMLVNTGGRERSKEDWEKLVKCAGFKGCKIRHIAAVQSVIEVFP

SEQ ID NO: 126 - protein, 286 aa, Nigella sativa
ANDEALDVEAQAHVWKIIYGFADSLVLRCAVELEIFDIIDNNNSIQLSELASKLPVANVIPDHLYRLLRYLVKMELLRLETSNKAVKEYTLEPTARLLLRNEKRSMVPMILGMTQKDFKDMFQSINSLVDVGGGNGTTIKAISDAFPHIQCTLFDLPHVIANSYDHPNIQRIGGDMFKSVPSAQAILLKLILHDWSDEDSIKILKQCKAAVPENGGKVIIVDVALDEDSDHELSSTRLILDIDMLVNTGGRERTKEDWERLVKSAGFSGCNIRHIAAIQSVIEVFP

SEQ ID NO: 127 - protein, 341 aa, Xanthorhiza simplicissima
LDIKAQAHVWKIIYGFADSLVLRCAVELGIVDIIDNNNQPIALADLASKLPVSNVNCDNLYRILRYLVKMEILRLENSDDGEKKYALEPIATLLSRNAKRSMVPMILGMTQKDFMTPWHSMKDGLSDDGTAFEKAMGMTIWEYLEGHPDQSQLFNEGMAGETRLLTSSLISGSRDMFQGIDSLVDVGGGNGTTIKAISDAFPHIKCTLFDLPHVIANSYDHPNIERIGGDMFKSVPSAQAILLKLILHDWNDEDSIKILKQCRNAVPKDGGKVIIVDVALDEESDHELSSTRLILDIDMLVNTGGKERTKEVWEKIVKSAGFSGCKIRHIAAIQSVIEVFP

SEQ ID NO: 128 - protein, 343 aa, Berberis thunbergii
ESVDIKAQAHLWKIIYGFADSLVLRCAVELGIADIINDNNQPITLPDLAAKLPVSNVNFDHLYRILRYLAHMKLIKQEEKRGVTLYSLEPIGTMLVKNAKRNMVPIILGMTQKDFMTSWHFMKDGLSNDGTTAFEKGMGMTIWEYLEGHPEQSQLFNEGMAGETRLLTSSLINGSRDLFKGINSLVDVGGGNGTTIKAISDAFPHIKCTLYDLPHVVANSYDLPNVERIPGDMFQSVPSAQAILLKLILHDWSDEDCIKILKKCKEAVPKEGGKVIIVDVALDEESDHELTSTRLILDIDMLVNTGGKERSKEDWDKLIKAAGFKGFNIRHIAAVQSVIEVFP

SEQ ID NO: 129 - protein, 256 aa, Mahonia aquifolium
FEPIGTMLVKNAKRNMVPIILGMTQKDFMTSWHFMKDGLSNDGTTAFEKGMGMTIWEYLEGHPEQSQLFNEGMAGETRLLTSSLINGCRDLFKGINSLVDVGGGNGTTIKAISDAFPHIKCTLYDLPHVVANSYDLPNVERIPGDMFQSVPSAQAILLKLILHDWSDEDCIKILTKCKEAVPKEGGKVIIVDVALDEESDHELTSTRLILDIDMLVNTGGKERSKEDWDKLIKAAGFKGFNIRHIAAVQSVIEVFP

SEQ ID NO: 130 - protein, 343 aa, Jeffersonia diphylla
EAVDIKAQAHLWKIIYGFADSLVLRCAVELGIADIIDNNNQPITLSDLASKLPLPSVNIDYLYRIMRYLVHMKLFKVEENINGVKQYSLQPTGTLLLRTAERNMVPMVLGMTQKDFVTPWHFMKDGLSDDGTAFEKGMGMTIWEYLEGHPDQSQLFNEGMAGETRLLTSSLISGCGDLFKGITSLVDVGGGNGTTLKGISDAFPHIKCTLFDLPYVIANSYDHPNIERIAGDMFQSVPSAQAILLKLILHDWSDEDCIKILKKCKEAVPKEGGKVIIVDVALDEESDHELTSTRLILDIDMLVNTGGKERTKEDWNKLVKAAGFRGFNIKHIAAVQSVIEVFP

SEQ ID NO: 131 - protein, 350 aa, Nandina domestica
AMNGKANEFEDIKAQAHLWKIIYGFADSLVLRCAVELGIADIISNNNKPISLSCLASKLPLPHVNLDHLYRIMRYLVHMKLLKLVVNENGEKLYALEPISTLLLKDAKRNMVPMVLGMTQKDFVTPWHYMKDGLSDDGTAFEKGMGMTIWEYLQGHPDQSQLFNEGMAGETRLLTSSLISGCGDLFKSLTSLVDVGGGNGTTIKAISDAFPHIKCTLFDLPYVIANSYDHPDIERISGDMFKSVPSAQAILLKLILHDWSDEDCIRILKQCKEAVPKEGGKVIIVDVALDEESDHELTSTRLILDIDMLVNTGGKERTKEDWDKLVKAAGFRGFNIRHIAAIQSVIEVFP

SEQ ID NO: 132 - protein, 347 aa, Menispermum canadense; identical to SEQ ID NO: 122

SEQ ID NO: 133 - protein, 239 aa, Cissampelos mucronata
MGSLDAKPAAATQEVSIKDQAQLWNIIYGFADSLVLRCAVEIGIADIIKNNDGAITLAQLAAKLPITNVSSDYLYRMVRYLVHLNIIEQETCNGGVEKVYSLKPVGTLLLRDAERSMVPMILGMTQKDFMVSWHFMKEGLGNGSTTAFEKGMGMDIWKYLEGNPDQSQLFNEGMAGETRLLTKTLIEDCRDTFQGLDSLVDIGGGNGTTIKAIYEAFPHIKCTLYDLPHVVANSHDLPN

SEQ ID NO: 134 - protein, 338 aa, Cocculus trilobus
QAQLWKFIYGFAESLVIKSAIQLDIPDIIDNHGKPITISELASRIPSQGPVDHDRLYRIMRYLVHMKLFTKESIDGEDQYGLAPPAKYLVKGWEKSIVPSILCITDKEFMSPWYHLKEGLSNGDNQTAFEKALGVNIWDYMSKNPKKNNIFNEAMACDTRLLMSALVSECKDMFQGIKSLVDIGGGTGTAVRYIAKAFPHINCTVYDLPHVAADSPTYPEVNRIEGDMFKYIPSADAILMKCILHDWADEECIQILKKCKEALPSTGGKVILVDIVLNAYSEHPYSKMRMVMDLDMMLNCGGKERTEEEWKKLIYAAGFSRYNIRQVNAIQSVIEVYP

SEQ ID NO: 135 - protein, 350 aa, Coptis japonica
MAFHGKDDVLDIKAQAHVWKIIYGFADSLVLRCAVELGIVDIIDNNNQPMALADLASKLPVSDVNCDNLYRILRYLVKMEILRVEKSDDGQKKYALEPIATLLSRNAKRSMVPMILGMTQKDFMTPWHSMKDGLSDNGTAFEKAMGMTIWEYLEGHPDQSQLFNEGMAGETRLLTSSLISGSRDMFQGIDSLVDVGGGNGTTVKAISDAFPHIKCTLFDLPHVIANSYDLPNIERIGGDMFKSVPSAQAIILKLILHDWNDEDSIKILKQCRNAVPKDGGKVIIVDVALDEESDHELSSTRLILDIDMLVNTGGKERTKEVWEKIVKSAGFSGCKIRHIAAIQSVIEVFP

SEQ ID NO: 136 - protein, 362 aa, Artificial Sequence
  Synthetic sequence
  misc_feature (1)..(106): Xaa can be any naturally occurring amino acid
  misc_feature (108)..(120): Xaa can be any naturally occurring amino acid
  misc_feature (123)..(124): Xaa can be any naturally occurring amino acid
  misc_feature (126)..(127): Xaa can be any naturally occurring amino acid
  misc_feature (129)..(129): Xaa can be any naturally occurring amino acid
  misc_feature (131)..(131): Xaa can be any naturally occurring amino acid
  misc_feature (133)..(195): Xaa can be any naturally occurring amino acid
  misc_feature (197)..(197): Xaa can be any naturally occurring amino acid
  misc_feature (199)..(205): Xaa can be any naturally occurring amino acid
  misc_feature (207)..(207): Xaa can be any naturally occurring amino acid
  misc_feature (211)..(211): Xaa can be any naturally occurring amino acid
  misc_feature (214)..(217): Xaa can be any naturally occurring amino acid
  misc_feature (219)..(220): Xaa can be any naturally occurring amino acid
  misc_feature (224)..(224): Xaa can be any naturally occurring amino acid
  misc_feature (226)..(226): Xaa can be any naturally occurring amino acid
  misc_feature (228)..(230): Xaa can be any naturally occurring amino acid
  misc_feature (234)..(234): Xaa can be any naturally occurring amino acid
  misc_feature (236)..(236): Xaa can be any naturally occurring amino acid
  misc_feature (238)..(242): Xaa can be any naturally occurring amino acid
  misc_feature (244)..(362): Xaa can be any naturally occurring amino acid
XXXXXXXXXXXXXXXXXXXXXXXXXXXXXXXXXXXXXXXXXXXXXXXXXXXXXXXXXXXXXXXXXXXXXXXXXXXXXXXXXXXXXXXXXXXXXXXXXXXXXXXXXXPXXXXXXXXXXXXXVPXXLXXTXKXFXXXXXXXXXXXXXXXXXXXXXXXXXXXXXXXXXXXXXXXXXXXXXXXXXXXXXXXXXXXXXXXDXFXXXXXXXDXGGGXGTXXXXIXXAFPXIXCXXXDLPXVXAXXXXXPXXXXXXXXXXXXXXXXXXXXXXXXXXXXXXXXXXXXXXXXXXXXXXXXXXXXXXXXXXXXXXXXXXXXXXXXXXXXXXXXXXXXXXXXXXXXXXXXXXXXXXXXXXXXXXXXXXXXXXX

SEQ ID NO: 137 - protein, 535 aa, Papaver bracteatum
MMCRGLTLRFFLFFVSLQTCVRGGDVNDNLLLSCLNSHDVHNFTTLSTDTNSEYLKLLHASIQNPLFAKPTVSKPSFIVIPGSKEELSSTIHCCTRESWTIRLRSGGHSYEGLSYTADTPFVIVDMMNLHGISIDFESETAWVESGATLGELYYAIAQSTETLGFTAGWCPTVGSGGHISGGGFGMMSRKYGLAADNVVDAILIDSKGAILDREKMGEDVFWAIRGGGGGVWGAVYAWKIKLLPVPEKLTVFRVTKNVKIEAASSLLHKWQYVADELDNDFTVSVLGGVNGNEAWLMFLGLHLGRKDAAKSIIDEKFPELGLVEKEFQEMSWGASMAFLAGLETISELNNRFLKFDDRAFKTKVDFTKEAVPLDVFRRALEMLSEQPGGFIALNGFGGKMSEISTDFTPFPHRKGTKLMFEYIIAWNQDEETKIGEFSEWLEKFYDYLEPFVSKEPRVGYVNHIDLDIGGIDWKNKSSTSNAVEIARNWGERYFSSNYERLVKAKTLIDPNNVFNHPQSIPPMMKFEENYILNEL

SEQ ID NO: 138 - protein, 515 aa, Papaver bracteatum
LFISCYLQLICALGGNDDILISCLASHGVENYTKPSSDPNSDYDRLFHINILNPLFKKTTSERLKPSLIVMPNSKQELSSTIKCCTRSSWTIKLRSGGHSYEGLSYISDTPFVLVDMMNLDRISIDLNSETAWVESGATIGQLYHAIHESTDSYGFTAGWCPNVGVGGHLSGGGLGMLSRKYGLAADNVVDAILIDSNGAILDRQSMGEDVFWAIRGGGGGCWGAVYSWKIKLLPVPRIVTVFREMRTVTMEEASLLIHKWQHVTEKLDKDFSMSFFTGANENEAWIAFLGLYLGPKTAAKPIIDLKFPELGLIEQEYHEMSWGESFARLAGIEVADFNNRSLVFDGRAFRAKVDATREPLTVKTIHGALEILSTEPYMFIAVNSIGGGRMSEISSDFTPFPHRNGTKLLIEYLYFADIDEPKHDVFTKGLKRLYDYMEPFASKEPRVAYINHIDLDLGTIDWRDENSSSNAVEISRSWGEKYFLSNYERLVKAKTLIDPNNVFNHPQSIPPMTK

SEQ ID NO: 139 - protein, 514 aa, Sanguinaria canadensis
RNLFSSLFIFLSALTCALGDDLLSCLTSHGVHNYTTPSSDSDSDYLRLLHVSIQNPLFLNPTTPKPVAIVMPRTKEELASTVRCCTRGSWTVRLRSGGHSYEGLSYTADTPFVLVDLMNLNRISIDIESETAWVESGATLGELYFAIAESTNSFGFTAGWCPTVGSGGHISGGGFGMMSRKYGLASDNVVDAILIDSNGAILDRNSMGEDVFWAIRGGGGGVWGAIYAWKIKLLPVPKKVTVFRLMKNIKIEEASFLLHKWQFVADELDDDFTLSILGGADENEVWLIFLGLYLGPKTVAKSTIDRKFPELGIIEEEVLEMSWGESFAYLAGLKTVDELNNRFLKFDDRAFKTKVDFANEPIPFKVINGALEILSKEPRGFVALNGLGGMMHKISSDFTPFPHRNGTRLMVEYIIAWNKDEESKNDEFTDWLERFYDYMEPFVSKDPRVGYVNHIDLDLGGIDWNNKTSSRNAIEIGRTWGERYFLSNYERLVKAKTLIDPKNVFNHPQSIPPM

SEQ ID NO: 140 - protein, 515 aa, Chelidonium majus
RKLLSYFFIFLSVLSCALGDDDLLSCLTSHGVHNYTSPTSDSNSDYLRFLHVSIQNPLFETPATPKPATIVLPRTKEELASTVRCCTSGSWTIRLRSGGHSYEGLSYTADTPFVLIDLMNMNRISIDVDSETAWVESGATLGELYYAISVATDSFGFTAGWCPTVGSGGHISGGGYGMMSRRYGLAADNVVDAILIDSNGAILDRATMGEDVFWAIRGGGGGVWGAIYAWKIKLLPVPKQVTVFRLMKNVKIEEASNLLHKWQFVAAELDDHFTLSVLGGAAGNEVWLIFLGLYLGPKTVAKSTIDQKFPELGLIEEEILEMSWGESMAYLADLKTVAELNNRFLKFDDRAFKTKVDFAKEPVPLPVINGVLQMLLKEPRGFIALNGLGGMMSKISSDFTPFPHRKGTRLMLEYIIAWNKDESSKSDEFTHWLQRFYDFMEPYVSKNPRVGYVNHIDLDLGGINWNNKTSSSNAIEIARTWGERYFLSNYERLVKAKTLIDPKNVFNHPQSIPPM

SEQ ID NO: 141 - protein, 508 aa, Stylophorum diphyllum
FFIFLSVLSCALGDDLQSCLTSHGVHNYTTPASDSNSDYLRFLHVSIQNPLFETPATPKPAAIVLPRTKEELESTVRCCTSGSWTIRLRSGGHSYEGLSYTADTPFVLIDLMNLNRISIHVESETAWVESGSTLGELYYAISEATDSFGFTAGWCPTVGSGGHISGGGYGMMSRRYGLAADNVVDAILINSNGATLDRNSMGEDVFWAIRGGGGGVWGAIYAWKIKLLPVPKKVTVFRLMKNVKIEEASNLLHKWQFVAAELDDDFTLSILGGAAGNEVWLIFLGLYLGPKTVAKSTMDQKFPELGLIEEEILEMSWGESLAYLADLKTVAELNNRFLKFDDRAFKTKVDFTKEPIPLPVINGVLEMLLEEPRGFIALNGLGGMMSKISSDFTPFPHRKGTRLMLEYIIAWNKDEESKSDEFTHWLQRFYDFMEPYVSKNPRVGYVNHIDLGLGGIDWNNKTSSSNAIEIARTWGERYFLSNYERLVKAKTMIDPKNVFNHPQSIPPM

SEQ ID NO: 142 - protein, 520 aa, Eschscholzia californica
RFSIFLSLLNCALGGNDLLSCLTFNGVRNHTVFSADSDSDFNRFLHLSIQNPLFQNSLISKPSAIILPGSKEELSNTIRCIRKGSWTIRLRSGGHSYEGLSYTSDTPFILVDLMNLNRVSIDLESETAWVESGSTLGELYYSITESTTKLGFTAGWCPTVGVGGHISGGGFGMMSRKYGLAADNVVDAILIDANGAILDRQAMGEDVFWAIRGGGGGVWGAIYAWKIKLLPVPEKVTVFRVTKNVAIDEATSLLHKWQFVAEELEEDFTLSVLGGADEKQVWLTMLGFHFGLKTVAKSTFDLLFPELGLVEEDYLEMSWGESFAYLAGLETVSQLNNRFLKFDERAFKTKVDLTKEPLPSKAFYGLLERLSKEPNGFIALNGFGGQMSKISSDFTPFPHRSGTRLMVEYIVAWNQSNEKKKPEFLDWLEKVYEFMKPFVSKNPRLGYVNHIDLDLGGIDWGNKTVVNNAIEISRSWGESYFLSNYERLIRAKTLIDPNNVFNHPQSIPPMANFDYLEKTL

SEQ ID NO: 143 - protein, 518 aa, Glaucium flavum
RNLSSSLLITFLSVLTCTLGDDLLSCLTSHSVHNYVTPTTTTDSNSEYHRILHVSIQNPLFDNPGTPKPAVIVLPSTKQELARTVRCCTSGSWTIRLRSGGHSYEGLSYTADTPFVLIDLMKLNRISIDVESETAWVESGATLGELYYKISEATDSYGFTAGWCPTVGTGGHISGGGYGMMSRRYGLAADNVVDAILVDANGAILDRESMGEDVFWAIRGGGGGVWGAIYAWKIKLLPVPKKVTVFRLMRNVKKEEATNLLHKWQFVAAELDDDFTLSVLGGGADGNLVWLIFLGLHLGPKTVAKSIIDEKFPELGLTEEECLEMSWGESFAYLAGLKTVEELNKRFMKFDDRAFKTKVDFTKEPIPLEVFNDALEMLSKEPRGFIALNGLGGMMSKTSTDFTPFPHRSGTKLMVEYIIAWNKDEESKRGEFTEWLQRFYDYMEPFVSKNPRVGYVNHIDLDLGGIDWNNKTSSSNAIKIARTWGESYFLSNYERLVKAKTLIDPKNVFNHPQSIPPM

SEQ ID NO: 144 - protein, 503 aa, Argemone Mexicana
LSDDILSCLTSNGVHNYTTPSSDSNSDYLRLYHLSIQNPLFEKSTISKPSLIVLPRNKEELSNTVRCCTRGSWTIRLRSGGHSYEGLSYTADTPFVLIDLMNLNRISIDIDSETAWVESGATLGELYYAITELTDSLGFTAGWCPTVGSGGHISGGGFGMMSRKYGLAADNVEDVILIDSKGAILDRKLMGEDVFWAVRGGGGGVWGAIYAWKIKLLPVPKKVTVFRVTKNVNIEEASFLIHKWQYVADELDDDFTVSILGGANGNEVWVIFLGLHLGCKTVAKSIIDKKFPELGLIEEEFLEMNWGESFAYLSGLKTVKELNNRFLKFDDRAFKTKVDFTKETLPLEAIDGLLEILSKEPRGFIALNGFGGKMSKISNDFTPFPHRKGTKLMVEYIVAWSKDEESKSDEFFDWLRNIYDYMEMFVSKNPRVGYVNHIDLDLGGIDWSDKNSSNNAIEIARNWGEKYFLSNYERLIRAKTLIDPNNVFNHPQSIPPMMKFDNV

SEQ ID NO: 145 - protein, 498 aa, Corydalis cheilanthifolia
LLSCLNSHGVNNYTTPSNDSGSDYNRFLYISMQNPLFERPTFRKPSAILIPGSKQQLSNSILCSRKSSLTIRLRSGGHSYEGLSYTADTPFVIIDLMNLNKISIDLESETAWVETGATLGEVYYSIAKSTDSLGFTAGWCPTVGSGGHISGGGFGMMSRKYGLAADNVIDAILIDANGQILDRKSMGEDVFWAIRGGGGGVWGAIYAWKIQLLPVPKTVTVYNFMKHIASVDEASNLLYKWQSVAFGLEEDYTLSILGGAAENQIWLMVLGLYLGPKSGAISTMERKFPELGLVEEQCLEMSWGEAFAYLSGVKTIDEMNNRFMKFDDRAFKTKVDFAKELVPLDGFKGLLEMLMKEHRGFIALNALGGMMSRISSDETPFPHRNGTLLMLEFIVAWNKDEDSNSDEYLGWLDEVFDYMGEFVSNNPRVGYVNHVDLDLGGLDWSNSSDSRNAIDIARSWGEKYFLKNYERLVKAKTLIDPNNVFHHPQSIPPLQGLD

SEQ ID NO: 146 - protein, 502 aa, Thalictrum flavum
DDDLPSCLTIHGVHNYTTHQSTSNSDAYHRLLYVSMQNQIFTRSTFPQPRVIILPESMDQLANVISCCTRGSWTIRLRSGGHSYEGLSHIADNPFVIIDLMNLNGISIDLDTQTAWVESGATLGEIYHAIGKSSGTMAFSAGYCPTVGSGGHISGGGFGMMSRKYGLAADNVVDALLVDANGVVLDRESMGEDVFWAIRGGGGGVWGAVYAWKLQLVPVPKNVTIFRLMKHSEVEDASKLLHKWQLVAPKLEDDFSLAVLAGTNKDSSIWLTFLGLYLGPKELASSSMHKKFPELNLLLEDCMEMSWVEATAELAGLKSVSELKDRFLRYDDRAFKTKVDFPKEAIPLEGIQGALEILKKEQRGFMVMNGQGGMMDRISTDATPFPHRSGTLSMVEYIVAWDKHEDLHSNEFIHWLHQLFDYMGKFVSNNPRVGYVNHVDLDLGRIDWVNKTVSSGRAIEIARTWGEKYFMSNYDRLVRAKTMIDPKNVFNHPQSIPPLLEI

SEQ ID NO: 147 - protein, 515 aa, Hydrastis Canadensis
RNFIVLLFLFVCILTCGALANDLLSCLTTHGVHNFTTPSDTNSDYHRLLYISMQNQLFTRPTFRRPSAIILPGSKDQLMNTIICCRKGSLAIRLRSGGHSYEGSSHVAETPFVIIDLMNLNGISIDLDTETAWVESGTTLGEFYYAIGASSDVLGFSAGYCPTVGSGGHISGGGFGMMSRKYGLAADNVIDALLIDANGDVFDRQSMGEDVFWAIRGGGGGNWGAIYAWKLQLVPVPKNVTVFKLMKHTSEIEEASKLLHKWQYIAPNLEDDFHLAVLTGADRDGFWLLFLGLYLGHKEVALSNMHEKFPELNLNSEECMEVSWVEAFAHLAGLNTVGVLNNRFLKYDDRAFKTKVDFAKVPIPLEGLNGALEILKKEQRGFMVMNGQGGLMSRISRDAIPFPHRNGTLSMIEYIVAWDKEEDSRSNEFLNWLQQFFDYMGQFVSNDPRVGYVNHVDFDLGTIDWTNSTISSSKAIEIARTWGEKYFLSNYERLVRAKTFIDPNNVFNHPQSIPP

SEQ ID NO: 148 - protein, 462 aa, Xanthorhiza simplicissima
NQIFTRPTFRRPSVIILPESKDQLVNIISCCRRGSWTIRLRSGGHSYEGLSHTADSPFVIIDMMNLNGVSIDLDTQTAWGESGATLGEIYHAIGVSSNVLGFSAGYCPTVGSGGHISGGGFGMMSRKYGLAADNVVDAILISPNGAIYDRKSMGEDVFWAIRGGGGGVWGVVYAWKLQLLPVPETVTVFKLMKHTSEIDEASKLLYKWQHVAPNLVDDFSLAVLNGADKDGFWLMFLGLYLGPKEFAVSSMHQKFPELNLLSEECKEVSWVEAFAQLAGLKEVDELNNRFLKYDDRAFKTKVDFAKAPIPLEGINGALQILKKEQRGFMVMNGLGGKMGRISRDSIPFPHRSGTLSMIEYIVAWEMEEDSNSHEYMNWLHQFYDYMGQFVGSNPRVGYVNHVDLDLGTIDWSNSTISASKAIEIARTWGEKYFLSNYERLVEAKTLIDPNNVLNHPQSIPPL

SEQ ID NO: 149 - protein, 530 aa, Berberis thunbergii
TALFFLVTICTITCTLGDVNLSSCLTSNGVSNFTVFSTSSDSDYHRLLYVSIQNQLFTRPNYPRPSMIILPHSREELSASVVCSNRGLWTIRLRSGGHSYEGLSYVADTPFVVIDLMNLNRISIALESKTAWVESGATLGEIYCAIGKASDTLGFSGGYCPTVGSGGHISGGGFGMMSRKYGLAADNVIDALIVDANGAVLDRSSMGEDVFWAIRGGGGGVWGAIYAWKLKLLPVPKHVTVFKLMKNFDNIEEASKILHKWQVVAQALEDDFTLSVLAGADTNGIWFSFLGLYLGPKELAISSVDQNFPELNLVKEDCNEMSWVESFAYLAGLNSVEEMNNRFLQYDDRAFKTKVDFVKEQIPLEGIKGALTMLTKELRGFMALNGQGGLMSRISSDSTPFPHRKGTLMMMEYIVAWDRDEDAKSNEFIGWLHRFYNYMGQFLTNDPRIGYVNHVDLDLGRLDWTNSTIASNAIEIARTWGEKYFLSNYERLVHAKTLIDPYNVFHHPQSIPPMPQDDLRPNEIWKTKEM

SEQ ID NO: 150 - protein, 509 aa, Jeffersonia diphylla
LIFLVSTLTCTLADFNLPSCLNTNGVNNYTTPSTSSDSDYHKFLYVSMQNPIFARPNFRRPSMIILPDSKEQLSNAIVCCRRGTLTIRLRSGGHSYEGLSHIADTQFVIIDLMNLNRVSIDLESKTAWVESGATLGELYYAIGKSTDSLGFPGGYCPTVGCGGHISGGGFGMMSRKYGLAADNVVDALIINPNGAVLDRNAMGEEVFWAIRGGGGGVWGAIYAWKIQLVPVPKDVTVFKLVKHMGDMEDASKLLHKWQLVAPQLEDDFTLSVLTGADINGIWFLFLGLYLGPKEMAISSMDRQFPELKVADGDCMVVSWLEAFAHLAGLNTVDEMNDRFLKYDDRAFKTKVDLVKEPIPIEGIHYALKMLSKEQRGFLALNGQGGIMSRISSDSIPFPHRKGTLMMVEYIVAWDKEKDSKCEEFLDWIQRFYNGMEQFVPNPRVGYVNHVDLDLGQLDWTNTTIGATAVEVARAWGEKYFLSNYDRLVQAKTLIDPSNVFHHPQSIPPL

SEQ ID NO: 151 - protein, 509 aa, Nandina domestica
FVLFMCTLTCTLCDETLKSCLTSKGVFNHTALSISSDSDYHRFLYVSMQNQIFTRPTYPRPSMIILPESKEELANAVMCCRSGSWTIRIRSGGHSYEGLSYVAESPFVVIDLMNLNRVSVDVESKTAWVESGATLGEIYYAIGESTDSLGFSGGYCPTVGSGGHISGGGFGMMSRKYGLAADNVVDALLVDANGVVLDRESMGEEVFWAIRGGGGGVWGAIYAWKIQLVEVPKKVTVFKLMKHMNDMEEAAKILHKWQLVAPGLEDDFSLAVLTGAEADGIWFMFLGLKLGPKEMAISSVEKYFGELNLSNEDCMEVSWVEAFTFLAGLNTVAEMNNRFLKYDDRAFKTKVDLLKDPIPLEGIHDALKMLSKEHRGFLALNGQGGIMSRISSDSIPFPHRKGTLMMMEYIVAWDKEEDSKSSEFIDWLQHFYDYMEKFVSNKPRVGYVNHVDLDLGVLDWTSTSMSSSAVEIARTWGDKYFGANYDRLVRAKTLIDPKNVFHHPQSIPP

SEQ ID NO: 152 - protein, 493 aa, Cissampelos mucronata
LFSCFSSSGVLNFTTTTNDLHRLLNLVIQNPIFTRPVFRKPATIVLPESKEQLASAISCCTRGSWTIRLRSGGHSYEGLSHTAQTPNFVIIDLMNLNRVEIDLGSETAWVESGATLGEVYYAISQTSDELCFPAGYCPTVGSGGYISGGGFGMMSRKYGLASDNVVDALLINSDGRIFDRKLMGEDVFWAIRGGGGGVFGAIYAWKLKLRKVPKRVTVLRFFKPNLDLNVAANILFKWQSVGPTLEDHFSLAVIFKSGHEERGVLLEFYGLYLGPKLEAKLRIDQVFPELEIPYGEYHEVSWIESFALLAGLDSATKMKDRSLKYDDRGFKAKSDFPRSPLPLEAITGVLERLLEEPRGFMVFNGFNGMMGKISSDASPFPHRSGTLMMVEYIVAWDMDEDLKSDKFLSWLHEIYEYVGQFINHKPRASYVNHLDFDLGEIDWRNESLASNAVEISRKWGEKYFLGNYGRLMRAKTLIDPNNLFQHPQSIPPM

SEQ ID NO: 153 - protein, 491 aa, Cocculus trilobus
CLSSNGVHNFTNFSPSNPDHNYHRLLNLVIQNPMFTRPTVNKPSTIVLPESKEQLANTVTCCRRGSWTIRLRSGGHSYEGLSHRAETPFVLIDLMNLNRIELDLESDTAWVESGATLGEIYYAISQASDTLGFSAGYCPTVGSGGHISGGGYGMMSRKYGLGSDNVVDALLVDANGDILDRKTMGEDVFWAIRGGGGGSWGAIYAWKIKLLKVPIRVTVFRLLKHDMDTNAAAKLVNKWQSIGPKLEDHFSLTVLLRADYNGVLVEFHGLYLGPKSEVMSRIDQVFPELEIPEEEYLEVSWIESFLHIAGLESVSQMNDRFLKWDDRAFKTKVDFPRSPLPLKAIKGALEMLLKEPHGFMVLNGYNGMMSRISSEASPFPHRKGTLMMIEYLVAWKMDEDWESHKFLCWLRAFHDYMGQYINNRPRLSYVNHVDLDLGEIDWRNESLASNAVEISRKWGERYFSSNYDRLVRAKTLVDPNNVFNHPQSIPP

SEQ ID NO: 154 - protein, 549 aa, Artificial Sequence
  Synthetic sequence
  misc_feature (1)..(65): Xaa can be any naturally occurring amino acid
  misc_feature (67)..(68): Xaa can be any naturally occurring amino acid
  misc_feature (70)..(78): Xaa can be any naturally occurring amino acid
  misc_feature (80)..(81): Xaa can be any naturally occurring amino acid
  misc_feature (83)..(84): Xaa can be any naturally occurring amino acid
  misc_feature (86)..(90): Xaa can be any naturally occurring amino acid
  misc_feature (92)..(96): Xaa can be any naturally occurring amino acid
  misc_feature (98)..(107): Xaa can be any naturally occurring amino acid
  misc_feature (117)..(117): Xaa can be any naturally occurring amino acid
  misc_feature (119)..(125): Xaa can be any naturally occurring amino acid
  misc_feature (127)..(129): Xaa can be any naturally occurring amino acid
  misc_feature (131)..(131): Xaa can be any naturally occurring amino acid
  misc_feature (133)..(144): Xaa can be any naturally occurring amino acid
  misc_feature (148)..(148): Xaa can be any naturally occurring amino acid
  misc_feature (150)..(150): Xaa can be any naturally occurring amino acid
  misc_feature (152)..(152): Xaa can be any naturally occurring amino acid
  misc_feature (154)..(154): Xaa can be any naturally occurring amino acid
  misc_feature (156)..(157): Xaa can be any naturally occurring amino acid
  misc_feature (159)..(160): Xaa can be any naturally occurring amino acid
  misc_feature (162)..(169): Xaa can be any naturally occurring amino acid
  misc_feature (171)..(172): Xaa can be any naturally occurring amino acid
  misc_feature (174)..(174): Xaa can be any naturally occurring amino acid
  misc_feature (177)..(177): Xaa can be any naturally occurring amino acid
  misc_feature (180)..(180): Xaa can be any naturally occurring amino acid
  misc_feature (183)..(184): Xaa can be any naturally occurring amino acid
  misc_feature (189)..(189): Xaa can be any naturally occurring amino acid
  misc_feature (192)..(192): Xaa can be any naturally occurring amino acid
  misc_feature (195)..(195): Xaa can be any naturally occurring amino acid
  misc_feature (199)..(200): Xaa can be any naturally occurring amino acid
  misc_feature (204)..(204): Xaa can be any naturally occurring amino acid
  misc_feature (206)..(212): Xaa can be any naturally occurring amino acid
  misc_feature (214)..(216): Xaa can be any naturally occurring amino acid
  misc_feature (219)..(220): Xaa can be any naturally occurring amino acid
  misc_feature (223)..(224): Xaa can be any naturally occurring amino acid
  misc_feature (229)..(229): Xaa can be any naturally occurring amino acid
  misc_feature (236)..(237): Xaa can be any naturally occurring amino acid
  misc_feature (239)..(240): Xaa can be any naturally occurring amino acid
  misc_feature (242)..(242): Xaa can be any naturally occurring amino acid
  misc_feature (245)..(246): Xaa can be any naturally occurring amino acid
  misc_feature (248)..(249): Xaa can be any naturally occurring amino acid
  misc_feature (252)..(254): Xaa can be any naturally occurring amino acid
  misc_feature (256)..(268): Xaa can be any naturally occurring amino acid
  misc_feature (270)..(274): Xaa can be any naturally occurring amino acid
  misc_feature (278)..(282): Xaa can be any naturally occurring amino acid
  misc_feature (284)..(307): Xaa can be any naturally occurring amino acid
  misc_feature (309)..(311): Xaa can be any naturally occurring amino acid
  misc_feature (313)..(313): Xaa can be any naturally occurring amino acid
  misc_feature (315)..(324): Xaa can be any naturally occurring amino acid
  misc_feature (326)..(326): Xaa can be any naturally occurring amino acid
  misc_feature (329)..(339): Xaa can be any naturally occurring amino acid
  misc_feature (341)..(358): Xaa can be any naturally occurring amino acid
  misc_feature (360)..(363): Xaa can be any naturally occurring amino acid
  misc_feature (365)..(365): Xaa can be any naturally occurring amino acid
  misc_feature (367)..(367): Xaa can be any naturally occurring amino acid
  misc_feature (369)..(370): Xaa can be any naturally occurring amino acid
  misc_feature (372)..(372): Xaa can be any naturally occurring amino acid
  misc_feature (374)..(387): Xaa can be any naturally occurring amino acid
  misc_feature (389)..(390): Xaa can be any naturally occurring amino acid
  misc_feature (392)..(397): Xaa can be any naturally occurring amino acid
  misc_feature (399)..(401): Xaa can be any naturally occurring amino acid
  misc_feature (403)..(406): Xaa can be any naturally occurring amino acid
  misc_feature (408)..(408): Xaa can be any naturally occurring amino acid
  misc_feature (410)..(412): Xaa can be any naturally occurring amino acid
  misc_feature (414)..(417): Xaa can be any naturally occurring amino acid
  misc_feature (423)..(423): Xaa can be any naturally occurring amino acid
  misc_feature (426)..(429): Xaa can be any naturally occurring amino acid
  misc_feature (431)..(464): Xaa can be any naturally occurring amino acid
  misc_feature (467)..(468): Xaa can be any naturally occurring amino acid
  misc_feature (470)..(470): Xaa can be any naturally occurring amino acid
  misc_feature (473)..(473): Xaa can be any naturally occurring amino acid
  misc_feature (475)..(477): Xaa can be any naturally occurring amino acid
  misc_feature (479)..(481): Xaa can be any naturally occurring amino acid
  misc_feature (483)..(491): Xaa can be any naturally occurring amino acid
  misc_feature (493)..(496): Xaa can be any naturally occurring amino acid
  misc_feature (498)..(498): Xaa can be any naturally occurring amino acid
  misc_feature (501)..(502): Xaa can be any naturally occurring amino acid
  misc_feature (505)..(506): Xaa can be any naturally occurring amino acid
  misc_feature (509)..(509): Xaa can be any naturally occurring amino acid
  misc_feature (512)..(513): Xaa can be any naturally occurring amino acid
  misc_feature (517)..(518): Xaa can be any naturally occurring amino acid
  misc_feature (521)..(521): Xaa can be any naturally occurring amino acid
  misc_feature (523)..(525): Xaa can be any naturally occurring amino acid
  misc_feature (533)..(549): Xaa can be any naturally occurring amino acid
XXXXXXXXXXXXXXXXXXXXXXXXXXXXXXXXXXXXXXXXXXXXXXXXXXXXXXXXXXXXXXXXXNXXFXXXXXXXXXPXXIXXPXXXXXLXXXXXCXXXXXXXXXXRSGGHSYEGXSXXXXXXXFXXXDXMXXXXXXXXXXXXTAWXEXGXTXGXXYXXIXXXXXXXXFXXGXCPXVGXGGXXSGGGXGMXSRXYGLXXDNVXDXXXXXXXGXXXDRXXMGXXVFWAXRGGGGGXXGXXYXWKXXLXXVPXXXTXXXXXXXXXXXXXAXXXXXKWQXXXXXLXXXXXXXXXXXXXXXXXXXXXXXXGXXXGXKXXXXXXXXXXFXELXXXXXXXXXXXWXXXXXXXXXXXXXXXXXXRXXXXDXRXFXXKXDXXXXXXXXXXXXXXLXXLXXXXXXFXXXNXXXXGXMXXXSXXXXPFPHRXGTXXXXEXXXXXXXXXXXXXXXXXXXXXXXXXXXXXXXXXXPRXXYXNHXDXXXGXXXWXXXXXXXXXAXXXXRXWGXXYFXXNYXRLXXAKTXXDPXNXXXHPQSIPPXXXXXXXXXXXXXXXXX

SEQ ID NO: 155 - protein, 526 aa, Artificial Sequence
  Synthetic sequence
  misc_feature (1)..(42): Xaa can be any naturally occurring amino acid
  misc_feature (44)..(45): Xaa can be any naturally occurring amino acid
  misc_feature (47)..(55): Xaa can be any naturally occurring amino acid
  misc_feature (57)..(58): Xaa can be any naturally occurring amino acid
  misc_feature (60)..(61): Xaa can be any naturally occurring amino acid
  misc_feature (63)..(67): Xaa can be any naturally occurring amino acid
  misc_feature (69)..(73): Xaa can be any naturally occurring amino acid
  misc_feature (75)..(84): Xaa can be any naturally occurring amino acid
  misc_feature (94)..(94): Xaa can be any naturally occurring amino acid
  misc_feature (96)..(102): Xaa can be any naturally occurring amino acid
  misc_feature (104)..(106): Xaa can be any naturally occurring amino acid
  misc_feature (108)..(108): Xaa can be any naturally occurring amino acid
  misc_feature (110)..(121): Xaa can be any naturally occurring amino acid
  misc_feature (125)..(125): Xaa can be any naturally occurring amino acid
  misc_feature (127)..(127): Xaa can be any naturally occurring amino acid
  misc_feature (129)..(129): Xaa can be any naturally occurring amino acid
  misc_feature (131)..(131): Xaa can be any naturally occurring amino acid
  misc_feature (133)..(134): Xaa can be any naturally occurring amino acid
  misc_feature (136)..(137): Xaa can be any naturally occurring amino acid
  misc_feature (139)..(146): Xaa can be any naturally occurring amino acid
  misc_feature (148)..(149): Xaa can be any naturally occurring amino acid
  misc_feature (151)..(151): Xaa can be any naturally occurring amino acid
  misc_feature (154)..(154): Xaa can be any naturally occurring amino acid
  misc_feature (157)..(157): Xaa can be any naturally occurring amino acid
  misc_feature (160)..(161): Xaa can be any naturally occurring amino acid
  misc_feature (166)..(166): Xaa can be any naturally occurring amino acid
  misc_feature (169)..(169): Xaa can be any naturally occurring amino acid
  misc_feature (172)..(172): Xaa can be any naturally occurring amino acid
  misc_feature (176)..(177): Xaa can be any naturally occurring amino acid
  misc_feature (181)..(181): Xaa can be any naturally occurring amino acid
  misc_feature (183)..(189): Xaa can be any naturally occurring amino acid
  misc_feature (191)..(193): Xaa can be any naturally occurring amino acid
  misc_feature (196)..(197): Xaa can be any naturally occurring amino acid
  misc_feature (200)..(201): Xaa can be any naturally occurring amino acid
  misc_feature (206)..(206): Xaa can be any naturally occurring amino acid
  misc_feature (213)..(214): Xaa can be any naturally occurring amino acid
  misc_feature (216)..(217): Xaa can be any naturally occurring amino acid
  misc_feature (219)..(219): Xaa can be any naturally occurring amino acid
  misc_feature (222)..(223): Xaa can be any naturally occurring amino acid
  misc_feature (225)..(226): Xaa can be any naturally occurring amino acid
  misc_feature (229)..(231): Xaa can be any naturally occurring amino acid
  misc_feature (233)..(245): Xaa can be any naturally occurring amino acid
  misc_feature (247)..(251): Xaa can be any naturally occurring amino acid
  misc_feature (255)..(259): Xaa can be any naturally occurring amino acid
  misc_feature (261)..(284): Xaa can be any naturally occurring amino acid
  misc_feature (286)..(288): Xaa can be any naturally occurring amino acid
  misc_feature (290)..(290): Xaa can be any naturally occurring amino acid
  misc_feature (292)..(301): Xaa can be any naturally occurring amino acid
  misc_feature (303)..(303): Xaa can be any naturally occurring amino acid
  misc_feature (306)..(316): Xaa can be any naturally occurring amino acid
  misc_feature (318)..(335): Xaa can be any naturally occurring amino acid
  misc_feature (337)..(340): Xaa can be any naturally occurring amino acid
  misc_feature (342)..(342): Xaa can be any naturally occurring amino acid
  misc_feature (344)..(344): Xaa can be any naturally occurring amino acid
  misc_feature (346)..(347): Xaa can be any naturally occurring amino acid
  misc_feature (349)..(349): Xaa can be any naturally occurring amino acid
  misc_feature (351)..(364): Xaa can be any naturally occurring amino acid
  misc_feature (366)..(367): Xaa can be any naturally occurring amino acid
  misc_feature (369)..(374): Xaa can be any naturally occurring amino acid
  misc_feature (376)..(378): Xaa can be any naturally occurring amino acid
  misc_feature (380)..(383): Xaa can be any naturally occurring amino acid
  misc_feature (385)..(385): Xaa can be any naturally occurring amino acid
  misc_feature (387)..(389): Xaa can be any naturally occurring amino acid
  misc_feature (391)..(394): Xaa can be any naturally occurring amino acid
  misc_feature (400)..(400): Xaa can be any naturally occurring amino acid
  misc_feature (403)..(406): Xaa can be any naturally occurring amino acid
  misc_feature (408)..(441): Xaa can be any naturally occurring amino acid
  misc_feature (444)..(445): Xaa can be any naturally occurring amino acid
  misc_feature (447)..(447): Xaa can be any naturally occurring amino acid
  misc_feature (450)..(450): Xaa can be any naturally occurring amino acid
  misc_feature (452)..(454): Xaa can be any naturally occurring amino acid
  misc_feature (456)..(458): Xaa can be any naturally occurring amino acid
  misc_feature (460)..(468): Xaa can be any naturally occurring amino acid
  misc_feature (470)..(473): Xaa can be any naturally occurring amino acid
  misc_feature (475)..(475): Xaa can be any naturally occurring amino acid
  misc_feature (478)..(479): Xaa can be any naturally occurring amino acid
  misc_feature (482)..(483): Xaa can be any naturally occurring amino acid
  misc_feature (486)..(486): Xaa can be any naturally occurring amino acid
  misc_feature (489)..(490): Xaa can be any naturally occurring amino acid
  misc_feature (494)..(495): Xaa can be any naturally occurring amino acid
  misc_feature (498)..(498): Xaa can be any naturally occurring amino acid
  misc_feature (500)..(502): Xaa can be any naturally occurring amino acid
  misc_feature (510)..(526): Xaa can be any naturally occurring amino acid
XXXXXXXXXXXXXXXXXXXXXXXXXXXXXXXXXXXXXXXXXXNXXFXXXXXXXXXPXXIXXPXXXXXLXXXXXCXXXXXXXXXXRSGGHSYEGXSXXXXXXXFXXXDXMXXXXXXXXXXXXTAWXEXGXTXGXXYXXIXXXXXXXXFXXGXCPXVGXGGXXSGGGXGMXSRXYGLXXDNVXDXXXXXXXGXXXDRXXMGXXVFWAXRGGGGGXXGXXYXWKXXLXXVPXXXTXXXXXXXXXXXXXAXXXXXKWQXXXXXLXXXXXXXXXXXXXXXXXXXXXXXXGXXXGXKXXXXXXXXXXFXELXXXXXXXXXXXWXXXXXXXXXXXXXXXXXXRXXXXDXRXFXXKXDXXXXXXXXXXXXXXLXXLXXXXXXFXXXNXXXXGXMXXXSXXXXPFPHRXGTXXXXEXXXXXXXXXXXXXXXXXXXXXXXXXXXXXXXXXXPRXXYXNHXDXXXGXXXWXXXXXXXXXAXXXXRXWGXXYFXXNYXRLXXAKTXXDPXNXXXHPQSIPPXXXXXXXXXXXXXXXXX

SEQ ID NO: 156 - protein, 489 aa, Papaver bracteatum
ENDFWMIACTVIIVFALVKFMFSFYQSANTTEWPEGPKTLPIIGNLHQLGGGVPLQVALANLSKVYGGAFTIWIGSWVPMIVISDIDNAREVLVNKSADYSARDVPDILKIITANGKNIADCDSGPFWHHLKKGLQSCINPSNVMSLSRLQEKDMQNLIKSMQERASQQNGILKPLDHAKEASIRLLSRVIFGQDFSNEDLVIGVKDALDEMVRISGLASLADAFKIAKYLPSQRKNIRDMYATRDRVYNLIQPHIVSNLPANSFLHFLTSQDYSDEIIYSMVLEIFGLGVDSTAATAVWALSFLVGKQEIQEKLYREINNLTGGQRPVKVADLKELPYLQAVMKETLRMKPIAPLAVPHVAVKDTTFKGRRIVKGTKVMVNLYAIHHDPNVFPAPYKFIPERFLKDVNSDGRFGDINTMESSLIPFGAGMRICGGVELAKQMVGFALASMVNEFKWDCVSEGKLPDLREAVSFILYMKNPLEAKITPR

SEQ ID NO: 157 - protein, 493 aa, Papaver bracteatum
MEENSWFITATITVIVVFVLAKFLASKIFSPTTMEWPAGPKTLPIIGNLHQLKGDLFHVVLQNLAKVHGGVFTIWIGSWNPVIIVSDFNIAREVLVSKSLDFSARSVPDYVKIVSAGGKTISESDCGPFWHGLRKGLQGVALNPLHLMSQSHLQERDMQNLIKSMQESASQEDGVIQPLDYIRKATIRLLSRILIGQDFSNEDFVDSMNHTLHKLVSIGGFASLADAFKIGEYLPTHKKFIRELKDVSEEAANLILPYIVSKPSKNTYLHFLVSQEYSEDVIVSAVLEIFGMSSDSTAAATVWALAFLVRHPDIQEKLYQEIKNVTGGNRPVQIVDVKKMPYLQAVVKETLRMKAVGPMGISHKASKNTSLMGKKIDKGTQVMVNHYAIHHNSDIFPEPYNFKPERFFKDVNSDASLGDREKMESSLLPFGAGMRVCAGTDIAKLIISFGIASLVNEFKWSCVSDGKLPDLSEDLSFILLMKNPLEARIAPRV

SEQ ID NO: 158 - protein, 485 aa, Sanguinaria canadensis
MEESFWLVTVSVIVLFAVAKFFRKSSSIPKMEWPAGPKKLPIIGNLHQLGGDVFHVVLANLAKVYGSVMTIWVGSWRPMIIVSDIDKAWEVLVSKSSDYSARDMPDITKIISANWKNISCSDSGPFWHNLRKGLQGGALAPLNVISQYHLQERDMQNLINSMQQEASKNNGILKPLDHLKQETVRLLSRLIFGQDFHDEKLVVGMHHALDDLVRISGYASLADAFKFAENLPSHKKSIREVHEVKERVENLVRPHIIPNPPTNTYLHFLQSQGFSEDIVISGILEVYDLGVDSTASTTVWALTFLVREQKIQEKLFEEIKKVTGGRSSVRVEEVSKMAYLQAVMKETMRMKPIAPMAIPHKTSKETSLMGRKVDKGSVIMVNLYAIHHNPEVYPEPYKFKPERFLQGSENIKAMEQSLLPFSAGMRICAGMELGKLQLAFGLASLVNAFKWDCAVDGELPDMSEDHCFILLMKNPLQARITPRTH

SEQ ID NO: 159 - protein, 490 aa, Sanguinaria canadensis
MEESFWIVSATIVVVFVIATMFRKSSSISSKTEWPAGPKKLPVIGNLHQLGGDVLHVVLANLAKVYGTVMTVWVGSWKPMIVISDIDRAWEVLVNKSNDYSGRDLPEITKIISANWKNIMTADAGPYWTSLRKGLTGHTLAPTNVASQSHLQEKDMNNLINRMKNQAASNNGIIKPLDHLKEETVRLLSRLIFGQHFEDEHFVEGIHQALDDLVRISGYASLADAFKFCENLPSHKKSISGVHEILSRVRNLVRPYIVPNPPTNTYLHFLQSQKFTEEVIIACILEVYDLGVDSTAATTVWALTFLVREPEVQEKLYREIQTVIGDRGTVKVEDISKMTYLQAVMKETMRMKPIAPMAIPHKAVRETTLMGNKIDKNTVVMVNLYAIHHNPKVFPEPYKFRPERFLAGGDGKFGNLKAMEQSLLPFSAGMRICAGMELGKLQYGFALASLVNAFNWTCTADGKLPDMSEDHCFILLMKNPLVARIIPRVN

SEQ ID NO: 160 - protein, 484 aa, Sanguinaria canadensis
WILAATTAVVFISITAIFFRRKSSSMEWPTGPKTLPIIGNMHLLGGTALHVVLHNFAKIYGNVMTIWIGSWRPVIVVSDIDRAWEVLVNKSSDYSARDMPEITKIISADWKTISTSDSGPFWTNLRKGLQNVALSPHNLAAQARFQERDISKMIETLKEEAALNNGIVKPLDHLKKATVRLISRLIYGQEFDNNKYVEDMHHAIEELIRVSGYARLAEAFYYAKYLPSHKKAVRDVEEANRRVKNLVRPFLSSNPPTNCYLHFLRTQNYPEEVIIFAIFEAYLLGVDSTSSTTAWALAFLVREPNVQEKLYQELKNFTTNNDRKMLKVEDINKLQYLQAVIKETMRMKPIAPLAIPHKACKETSLMGSKVDKGTRVMVNIYALHHNQKVWKEPYKFMPERFLETDNQDGNVGKAMEQSLLPFSAGMRICAGMELGKLQFTFSLANLVNAFKWSCVSDGVLPDMSDQLGFVLLMKNPLEARIVPR

SEQ ID NO: 161 - protein, 480 aa, Sanguinaria canadensis
WLLPATLLAVIAIAKFFLGKSSTMKWPIGPKTLPIIGNMHQLGGTDLQVVLANLAKTYGTIMTIWVGSWRPMIVLSDIEKAWEVLVNKSSDYSGRAMPEITEIISAKGKTISTSDSGPHWSNLRKGLQNVALSPHNIAAQSRFQESDITKMIKTLKQEAASNNGIVQPLDHLKKSTVRLISRLIFGQDFDDDEYVEAMHLAVEELIRVSGYARLAEAFYYAKYLPSHKRAVSEVWEANRRVKRIVKPRLSANPPPNCYLHFLSSQDYSEEMIIFAIFEAYLLGVDSTSSTTAWALGFLIREPKVQERLYQELKNCAGENGLIKVEDINKLPYLQAVLKETMRMKPIAPLAIPHKAVRETSLAGNKVEPGTRVMVNLYAIHHNPKVWIDPHKFKPERFLQGEENGGGNLKLMEQSLLPFSAGMRTCAGMELGKLQFGFSLANLVNAFQWDCAKKGMFPDMSDLLGFVLLMKTPLQAKIVPR

SEQ ID NO: 162 - protein, 494 aa, Sanguinaria canadensis
WILTAVIVVVVVAMASKIFSNRRKSSMKWPDGPKTLPIIGNMHQLGGTAGLQVVLHKLADVYGSIMTIWIGSWRPVIVVSDIDKAWEVLVNKSSDYSARDMPEITRINTANWRTISTSDSGPFWSNLRKGLQNVALSPHNLAAQSQFQERDINRLIKNLKEEAALNDGIVKPLDHLKKATVRLLSRLIYGQNFNDDKYVETMHNEIEELIRISGYARLAEAFYYAKYLPSHKRVEKAVEEAHYRIKALISPLLSWNPPLNSYLHFLRSQNYPEEVIIFCIYEVYLLGVDSTSSTTAWALAFLVREPAVQEKLYQELNNFTHDRQMSAVKVEDVNKLPYLQAVMKETMRMKPIAPLAIPHKTCKETSLGGNKVDKGTRVMVNLHAIHHNPKVWHEPYRFLPERFLQVNKETINNGGGGGGTAKEMEQSFLPFSAGMRICAGMELGKLQFGLALANLVNAFQWSCVADGKLPDMSDLLGFVLFMKNPLEARIVPRI

SEQ ID NO: 163 - protein, 458 aa, Sanguinaria canadensis
WPPGPKTLPIIGNLHQLGGDVIHVTLAKLAKVHGGIMTIWLGSWLPVIVVSDFDKAWEVLVNKSSDYSGRGMPEITKIVSADWRTISFANSSPIHNLRKGLQNGPLGPLNVSSQIHLQEKDMKQMICDMQKEATIHGGIIKPLYHLKKATVRLLSRLIFGLTFDDDSFMQSIYHVTEELTRVSGYGHLAEAFSYAKYLPSHKHAVKESHAAKLKVENLVRPLLALNPPPNSYLHFLQSQDYPEEVIIFCIFEIYLLGVDSTSWTTTWALAFMIRDQAVQEKLYKEIKSITGGSKGLARTTDLSKCHYLQAVMKETMRMKPIAPLAIPHTASKDTTLMGIKVAKGTRIMVNLYSLHHNPKIWTEPYRFMPERFLQEELNGHGGGASGKAIEQSWLPFSAGMRICAGMDLGKLQFCFALANLVNTFQWTSVADGKLPNMSEEMSFILFMKNPLEAKIIPR

SEQ ID NO: 164 - protein, 463 aa, Sanguinaria canadensis
SSTQWPTGPKTLPIIGNLHQLEGDVFHVALAKLAKMHGDIMTIWIGSWRPVIVISDYDKAWEVLVNKSSDYSARDMPEITKIASAGWRTISLSSSGPFWHTLRKGLQNGPFGPLNVSAQILSQERDMRRMIRDMQEEADINGGIVKPLGHLKKATVGLLTRLIFGQNFDDDSFIESIHHETEELIRISGYARLAEAFSYAKYLPSHRRAVKESYECKHRVEELVKPLLSSNPPKNSYLNFLQSQDYPEEVIIFCIFEIYLLGVDSTSSTTTWALAFLIHEPAVQEKLYQEVKCITNGDGGLVKAGDLSKFQYLQAVMKETMRMKPIAPLAIPHTTSKDTTLMGTKVAKGTRIMVNLYALHHNPNIWSEPFKFMPERFLQEQFNGVGGDANVKAIEQSFLPFSAGMRICAGMDLGKLQFSFALANLVNAFKWTTVADGKFPDMNEELSFVLLMKTPLEARIVPR

SEQ ID NO: 165 - protein, 467 aa, Sanguinaria canadensis
RNSSSIINWPPGPKTLPIIGNLHQLGGQLLHVALTNLAKVHGGVMTIWIGSWRPIIVISSPEEVWEVLVKKSPDYAARDMPEITKLITGYWHTISSSHSGQFWSNLRKGLQNGPLGPLNITTQMSFQERNIKRMISDIQEEATFNGGIVKPLEHLKKATLRLLSHIIFGQSFDDDQFIDSMHHQIEELIRINGFAHLVEAFSYAKYLPSHKRAIKETYRVKNQIEQLVRPVIASSPPANCYLHFLLSQGYSEEVVIYSIVELYSLGVDSTASTTTWALAFLIHDQTVQDKLYQDIKHIAAADALVKIEDLSALHYLEAVMKETMRMKPIAPLAIPHKTSKDTTVRGTKVAAGTCVLVNLYALHHDHKIWAKPHKFMPERFLEGNVNGGDSSGANVKAIEQSFLPFGAGMRICAGMELGKLQFSFALANLVNAFKWTSVVDGKLPDMSEELKFIMLMKTPLEARIIPR

SEQ ID NO: 166 - protein, 490 aa, Chelidonium majus
MEESFWLVAATVLVVFVVAKLLFRKSSSISTMEWPAGPKTLPIIGNLHQLGGAALHVVLANLAKVYGSVMTIWVGAWRPMIVISDIDKAWEVLVNKSSDYSARSLPEITRIISANWKNIMTSDSGPFWQNLRKGLQGGALSPHNVMSQYQLQERDMQNLIKTMRVEASKNNGRIKPLDHLKQETVRLLSRLIFGQDFNDEKLVVGMHHALDDLVRISGYASLADAFKVAENLPSHKKSIREVHELKRRVENLVRPHIVSNPPTNTYLNFLLSQNFSEDLIISAILEVYDLGVDSTASTTVWALTFLVREQKVQEKLYQEIKNLTGGRSTVKVEEVSKMPYLQAVMKETMRMKPIAPMAIPHTAARETSLMGKKIDKGTVVMVNLYAIHHNPNIFPEPYKFMPERFLHGEEQNGGNIKEMEQSLLPFSAGMRICAGMELGKLQLGFALASLVNAFKWECAADGKLPDLSEDHCFILLMKNPLEAKITPRTH

SEQ ID NO: 167 - protein, 457 aa, Chelidonium majus
WPAGPKTLPIIGNLHQLGGGVPLQVALANLAKVYGGAFTIWIGSWVPMIIISDIDNAREVLVNKSADYSARDVPDILKIITANGKNIADCDSGPFWHNLKKGLQSCINPSNVMSLSRLQEKDMQNLIKSMQERASQQNGIVKPLDHAKEASMRLLSRVIFGQDFSNEDLVIGVKDALDEMVRISGLASLADAFKIAKYLPSQRKNIRDMYATRDRVYNLIQPHIVSNLPANSFLHFLTSQDYSDEIIYSMVLEIFGLGVDSTAATAVWALSFLVCEQEIQEKLYREINNLTGGQRPVKVVDLKELPYLQAVMKETLRMKPIAPLAVPHVAAKDTTLKGRRIVKGTKVMVNLYAIHHDPNVFPAPYKFMPERFLKDVNSDGRFGDINTMESSLIPFGAGMRICGGVELAKQMVAFALASMVNEFKWDCVSEGKFPDLSEAISFILYMKNPLEAKITPR

SEQ ID NO: 168 - protein, 480 aa, Chelidonium majus
WIITATTLAVVILLTTILRRKSSSMKWPKGPKTLPIIGNMHLFGGTDLHVVLYNIAKVYGNVMTIWIGSWRPVIVISDIERAWEVLVNKSSDYSARDMPEITKLISSDWKTISTSDAGAFWTNLRKGLQNVALSPHNLASQFQFQESDIKKLIETIKEEAAVNNGIVKPLDHLKKAMVRLISRLVFGQDFDNDEYVEGMHHAIEELIRVSGYARLAEAFYYAKYLPSHKKAVRDVEEANRRVQKLVRPFLSLNPPTNTYLHFLRSQNYSEEVIIFAIFEAYLLGVDSTSSTTAWALAFLIREPNVQEKLYQELKNFTVKNGRDMLKVEDINKLPYLQATIKETMRMKPIAPLAIPHKACRDTSLKGSKIDKGTRVMVNIYALHHNEKIWKEPFKFMPERFLQTEGENGKAMEQSFLPFSAGMRICAGMELGKLQFNFALANLVNAFKWSCVADGVLPDMSDQLGFVLVMKTPLEARITSR

SEQ ID NO: 169 - protein, 477 aa, Chelidonium majus
IVVVFATVSMMFGRRRKSSMKWPNGPKTLPIIGNMHQLGGTALQVVLHKLADVYGSVMTIWIGSWRPVIVVSDIDKAWEVLVNKSSDYSARDMPEITRINTANWSTISTSDSGPHWSNLRKGLQNVALSPLNVAAQSQFQEKDINQVIKNLQEESALNGGIVKPLDHLKKATVRLLSRFIYGQNFDDDTYVENMHNEIEELIRISGYARLAEAFYYAKYLPSHKKVEKAVEEAHYRVKALISPFLTRNPPPNSYLHFLRSQNYPEEVIIFCIYEVYLLGVDSTSSTTAWALAYLVRESAVQEKLYQELNNFIGDRQQMGSAIKVEDVNKLQYLQAVMKETMRMKPIAPLAIPHKACKDTSLGGNKVDKGTKVMVNLHAIHHNPKVWNEPNRFKPERFLQLKDKKEMEQSYLPFSAGMRTCAGMELGKLQFGFALANLVYAFQWSCVADGKPPDMSDLLGFVLFMKTPLEARIVPRVR

SEQ ID NO: 170 - protein, 490 aa, Stylophorum diphyllum
MEESFWLVTATVVAVFVVAKLLFRKSSSISTMEWPAGPKTLPIIGNLHQLGGAAFHVVLANLAKVYGSVMTIWVGAWRPMIVISDIDKAWEVLVNKSSDYSARSLPEITRIISANWKNIMTSDSGPFWQNLRKGLQGGALSPHNVISQYQLQERDMQNLIKTIRVEASTNNGRIKPLDHLKQETVRLLSRLIFGQDFKDEKLVVGMHHALDDLVRISGYASLADAFKFAENLPSHKKSIREVHELKKRVENLVRPHIVSNPPTNTYLNFLLSQNFSEDLIISAILEVYDLGVDSTASTTVWALTFLVREQKVQEKLYQEIKNLTGGRSTVKVEEVSKMPYLQAVMKETMRTKPIAPMAIPHTAARETSLMGKKVDKGTVVMVNLYAIHHNPNIFPEPYKFMPERFLQGEEQNGGNIKEMEQSLLPFSAGMRICAGMELGKLQLGFALASLVNAFKWECAVDGKLPDMSEDHCFILLMKNPLEAKITLRTH

SEQ ID NO: 171 - protein, 477 aa, Stylophorum diphyllum
MEESFWLVTATVLVVFVVAKLLFRKSSSISTMEWPVGPKTLPIIGNLHQLGGAAFHVVLANLAKIYGSVMTIWVGAWRPMIVISDIDKAWEVLVNKSSDYSARSLPEITRIISANWKNIMTSDSGPFWQNLRKGLQGGALSPHNVISQYQLQERDMQHLIKTMRVEASKNNGRIKPLDHLKQETVRLLSRLIFGQDFNDEKLVVGMHHALDDLVRISGYASLADAFKFAENLPSHKKSIREVHELKKRIENLVRPHIVSNPPTNTYLNFLLSQNFSEDLIISAILEVYDLGVDSTASTTVWALTFLVREQKVQEKLYQEIKNLTGGKSTVKVEEVSKMPYLQAVMKETMRMKPIAPMAIPHTAARETSLMGKKIDKGTVVMVNLYAIHHNPNIFPEPYKFMPERFLHGEEQNGGNIKEMEQSLLPFSAGMRICAGMELGKLQLGFALASLVNAFKWECAVDGKLPDMSEDHCFILLM

SEQ ID NO: 172 - protein, 481 aa, Stylophorum diphyllum
WIITAITLAVVIIMMTIFRRKSSSMKWPKGPKTLPIIGNMHLFGGTDLHVVLYNIAKVYGNVMTIWIGSWRPVIVISDIERAWEVLVNKSSDYSARDMPEITKLISSDWKTISTSDAGAFWTNLRKGLQNVALSPHNLASQFQFQESDIKKLIETIKEEGAVNNGIVKPLDHLKKAMVRLISRLIFGQDFDNDKYVEGMHHAIEELIRVSGYARLAEAFYYAKYLPSHKKAVRDVEEANRRVQKLVRPFLSLNPPTNTYLHFLRSQNYSEEVIIFAIFEAYLLGVDSTSSTTAWALAFLIREPNVQEKLYQELKNFTVKNGRDMLKVEDINKLPYLQATIKETMRMKPIAPLAIPHKACRDTSLMGSKIDKGTRVMVNIYALHHNEKIWKEPFKFMPERFLQTEGEVNGKAMEQSFLPFSAGMRICAGMELGKLQFNFALANLVNAFKWSCVADGVLPDMSDQLGFVLVMKTPLEARITPR

SEQ ID NO: 173 - protein, 489 aa, Eschscholzia californica
MEESLWVVTATVVVVFAIAKLLKKSSSISTMEWPKGPKKLPIIGNLHQLGGEAFHVVLANLAKIHGTVMTIWVGAWRPMIVISDIDKAWEVLVNKSSDYAGRDFPEITKIISANWKNISCSDSGPFWQNLRKGLQGGALAPLNVISQYQLQERDMKNLITSMQEKASKNNGILKPLDYLKEETIRLLSRLIFGQSFNDENFVKGVHLALDDLVRISGYASLADAFKFCENLPSHKKSIREVHEVNERVVNLVKPYLVKNPPTNTYLYFLNSQKFSDEVIISAVLEVYDLGVDSTASTAVWALTFLVREPRVQEKLYKEIIDLTGGERSVKVEDVSKLPYLQAVMKETMRMKPIAPMAIPHKTSRDTSLMGKKVNKGTSIMVNLYAIHHNPKVFPEPYKFIPERFLQGQESKYGDIKEMEQSLLPFSAGMRICAGMELGKLQYGFSLASLVEAFKWTCAVDGKLPDLSEDHCFILLMKNPLEARITPRTQ

SEQ ID NO: 174 - protein, 482 aa, Eschscholzia californica
WILTATATTLLISIFLFFTRKSSKMVWPAGPKTLPIIGNMHLLGGTALQVVLHNLAKVHGSVMTIWIGSWRPVIVVSDIERAWEVLVNKSSDYSARDMPDITKIISADWKTISTSDSGPHWTNLRKGLQNVALSPHNLAAQFQFQEKDMTKMIQTLEEEARNNNGIVKPLDHMKKATLRLISRLVFGQDFNNDKYVDDMHLAIEELIRVSGYARLAEAFYYAKYLPSHKKAVREVEEAQRRVQNLVSPFLSLNPPTNTYLHFLRSQKYDDEVIIFAIFEAYLLGVDSTSLTTAWALAFLIREPNVQEKLYQELKNFAEKNDRKIMKVEDINKLQYLQAVTKETMRMKPIAPLAIPHKACRDTSLMGKKIDKGTRVMVNIFALHHNKNVFNDPFKFMPERFMKVDSQDANGKAMEQSLLPFSAGMRICAGMELGKLQFSFALANLAYAFKWSCVADGVLPDMSDQLGFVLLMKTPLEARINRR

SEQ ID NO: 175 - protein, 467 aa, Eschscholzia californica
LFFRRKSPNMAWPEGPKTLPIIGNMHLLGGTALQVVLYNLAKVHGRVMTIWIGSWRPVIVVSDIEQAWEVLVNKSSDYSARDMPDITKIVTADWRTISTSDSGPHWSNLRKGLQNIAISPNNLAAQFQFQEKDIIKMIQILQQEAKDNNGIVKPLDHLKKATIRLISRLVFGRDFEEDKYVEDMHHAIEELIRISGYARLAEAFYYAKYLPSHRKAVRYVEELKQIVKNLIRPFLSVNPPTNTYLHFLRSQNYDEEVVIFAIFETYLLGVDSTSSTTAWALAYLVREPSVQDRLHQELDHFAKQNDRKILKVEDMNKLQYLQAVIKETMRMKPIAPLAIPHKACKDTSLMGNKINKGTRVMVNLYALHHNKNVFNDPFKFMPERFLKVDNQDAKGKAMEQSLLPFSAGMRICAGMELGKLQFSFALANLIFSFKWSCVDDGILPDMSDELGFVLFMKTPLEARIVPR

SEQ ID NO: 176 - protein, 467 aa, Eschscholzia californica
LFFRRKSPNMAWPEGPKTLPIIGNMHLLGGTALQVVLYNLAKVHGRVMTIWIGSWRPVIVVSDIEQAWEILVNKSSDYSARDMPDITKIVTADWRTISTSDSGPHWSNLRKGLQNIALSPNNLAAQFQFQEKDIIKMIQILQQEAKDNNGIVKPLDHLKKATIRLISRLVFGRDFEEDKYVEDMHHAIEELIRISGYARLAEAFYYAKYLPSHRKAVRYVEELKQIVKNLIRPFLSLNPPTNTYLHFLRSQNYDEEVVIFAIFETYLLGVDSTSSTTAWSLAYLVREPNVQDRLHQELDHFAKQNDRKILKVEDMNKLQYLQAVIKETMRMKPIAPLAIPHKACKDTSLMGNKINKGTRVMVNLYALHHNKNVFNDPFKFMPERFLKVDNQDAKGKAMEQSLLPFSAGMRICAGMELGKLQFSFALANLIFAFKWSCVDDGVLPDMSDELGFVLLMKTPLKARINPR

SEQ ID NO: 177 - protein, 482 aa, Eschscholzia californica
WILTATATTLLISMFLFFTRKSSKMVWPQGPKTLPIIGNMHLLGGTALQVVLHNLAKVHGSVMTIWIGSWRPVIVVSDIERAWEVLVNKSSDYSARELPDIIKYNTADCRTIATCDSGPHWSNLRKGLQNVALSPNNLAAQFQFQEKDVIKMIDILEQEAINKNGIVKPLDHLKKATIRLISRLVFGQDFNDDKYVEDLHQAIEELIRMSGYAQLAEAFYYAKYLPSHKKAIRHAELTKQIVTNLVRPFLSLNPPTNSYLHFLQSQKYDEEMVIFAIFETYLLGVDSTSSTTAWALAYLVREPNVQDRLYNELNNYAKYNDRKILKVEDINKLQYLQAVTKETMRMKPIAPLAIPHKACRDTSLMGTKIDKGTKVMVNLHALHHNENVFTDPFKFMPERFLKVNNEDVNMKAMEQSLLPFSAGMRICAGMELGKLQFSFALANLVYAFKWSCVDDGVLPDMSDELGFVLFMKTPLEARIVPR

SEQ ID NO: 178 - protein, 490 aa, Glaucium flavum
MEESFWLVTATVIVVFAVAKFFTRSSSISKMEWPAGPKKLPIIGNLHQLGGNVFHVVLANLAKVHGSVMTIWVGSWRPMIVISDIEKAWEMLVTKSSDYSGRSFPEITKIISANWKNISCSDSGPFWTNLRKGLQGGALAPLNVISQYHLQEKDMENLVKSMRVEASKNNGNIKPLDHLKQETVRLLSRLIFGQDFHDEKLVVGMHHALDDLVRISGYASLADAFKIAENLPSHKKSIREVHEVNERVKKLVRPHIVSNPPTNTYLYFLQSQKFSEDVIISAILEVYDLGVDSTASTTVWALTFLVREQEIQEKLYQEIKSVSGGRSTVKVEEVSKMPYLQAVMKESMRMKPIAPMAIPHKAQRETTLMGKKVDKDTVLMVNLYAIHHNPNVFPEPFKFMPERFLQGEDHHNGGNIKAMEQSLLPFSAGMRICAGMELGKLQLAYGLASLVNAFKWDCAVDGKLPDMSEDHCFILLMKNPLEARITPRTH

SEQ ID NO: 179 - protein, 459 aa, Glaucium flavum
EWPAGPKKLPIIGNLHQLGGDVFHVVLANLAKVHGSVMTIWVGSWRPMIVISDIEKAWEMLVTKSSDYSGRSFPEITKIISANWKNISCSDSGPFWTNLRKGLQGGALAPLNVISQYHLQERDMENLVKSMRVEASKNNEIIKPLDHLKQETVRLLSRLIFGQDFHDEKLVVGMHHALDDLVRISGYASLADAFKIAENLPSHKKSIREVHEVNERVKKLVRPHIVSNPPTNTYLYFLQSQKFSEDVIISAILEVYDLGVDSTASTTVWALTFLVREQKIQEKLYQEIKSVSGGRSTVKVEEVSKMPYLQAVMKESMRMKPIAPMAIPHKAQRETTLMGKKVDKDTVLMVNLYAIHHNPNVFPEPFKFMPERFLQGEDHHNGGNIKAMEQSLLPFSAGMRICAGMELGKLQLAYGLASLVNAFKWDCAVDGKLPDMSEDHCFILLMKNPLEARITPRTH

SEQ ID NO: 180 - protein, 481 aa, Glaucium flavum
WVITGTTLAVLILMTTMFRKKSLSMKWPKGPKTLPIIGNMHLLGGTNLQVILHNMSKVYGNVMTIWIGSWRPVIVVSDIERAWEVLVNKSSDYSGRDMPEITKIISADWKTISTSDSGPHWTNLRKGLQNVALSPHNLAAQFQFQERDICKLIETLKEEAKLNNGIVKPLDHLKKATIRLISRLVFGQDFDNSKYVEDMHHAIEELIRVSGYARLADAFYYAKYLPSQKKAVRDVEEAQRRVQRLVRPFLSLNPPTNCYLHFLRSQNYSDEVIIFAIFEAYLLGVDSTSSTTAWALAFLVREPNVQEKLYQELKNFTAKNGREMLKVEDINKLPYLQAVIKETMRMKPIAPLAIPHKACRDTSLKGRKIDKGTQIMVNIYALHHNENVWKEPFKFMPERFLQTDQDVNGKAMDQSLLPFSAGMRICAGMELGKLQFSFSLANLLNTFQWSCVADGVLPDMSDQLGFVLLMKTPLEARITPR

SEQ ID NO: 181 - protein, 482 aa, Glaucium flavum
WILTTSVVVLVFAIASKMFANGRKSSMKWPEGPKTLPVIGNMHQLGGTALQVVLHKLADVYGSVMTIWIGSWRPVIVVSDIDRAWEVLVNKSSDYSAREMPEITRINTANWRTISTSDSGPHWSNLRKGLQNVALSPLNVAAQSQFQERDINQVIKDLQEEAALNNGIVKPLDHLKKATVRLLSRFIYGQNFHDDKYVESMHYEIEELIRISGYARLAEAFYYAKYLPSHKKLEKAVEEAHYRVKALISPLLTSDPPPNSYLHFLLSQNHPEEVIIFCIYEVYLLGVDSTSSTTAWALAFLVREPAVQEKLYQELSNFVGDRQQMGCAVKVEDVNKLQYLQAVMKETMRMKPIAPLAIPHKACKDTSLGGNKVDKGTRVMVNLHALHHNPKVWKEPNTFKPERFLELKDKEMEQSFLPFSAGMRTCAGMELGKLQFGFALANLVNAFQWTCVADGKLPDMSDLLGFVLFMKTPLEARIVPRV

SEQ ID NO: 182 - protein, 475 aa, Argemone Mexicana
FTIFIILRRNKSSSSKMVWPTGPKTLPIIGNMNILGGTALHVVLHNLAKTYGNVMTIWIGSWRPVIVVSDIDRAWEVLVNKSSDYSARDMPEITKLATADWKTISSSDSGPFWTNLRKGLQNVALSPQNLSSQSKFQERDIIKTIQNLKEEAKMNNGIVKPLDHLKKAMVRLISRLIYGQDFDNDEYVEEMHHTIEELIRVSGYARLAEAFYYAKYLPSHKKAVREVLQANQRVQNLVRPLLSLNSPTNTYLHFLRSQNYEDEVIIFAIFEAYLLGVDSTSSTTAWALAYLIREPNVQEKLYEELKNFTNDNDRKMVKFEDLNKLQYLQAVVKETMRMKPIAPLAIPHKACRETSLMGRKVNQGTRVMVNIYALHHNQNVWKEPYKFNPERFLQKNQDGVDGKAMEQSLLPFSAGMRICAGMELGKLQFSFALANLVNAFKWSCVSDGVFPDMSDQLGFVLLMKTPLEAGIVPRM

SEQ ID NO: 183 - protein, 490 aa, Corydalis cheilanthifolia; identical to SEQ ID NO: 159

SEQ ID NO: 184 - protein, 455 aa, Corydalis cheilanthifolia
RSISSKTEWPAGPKKLPVIGNLHQLGGDVLHVVLANLAKVYGTVMTVWVGSWKPMIVISDIDRAWEVLVNKSNDYSGRDLPEITKIISANWKNIMTADAGPYWTSLRKGLTGHTLAPTNVASQSHLQEKDMNNLINRMKNQAASNNGIIKPLDHLKEETVRLLSRLIFGQHFEDEHFVEGIHQALDDLVRISGYASLADAFKFCENLPSHKKSISGVHEILSRVRNLVRPYIVPNPPTNTYLHFLQSQKFTEEVIIACILEVYDLGVDSTAATTVWALTFLVREPEVQEKLYREIQTVIGDRGTVKVEDISKMTYLQAVMKETMRMKPIAPMAIPHKAVRETTLMGNKIDKNTVVMVNLYAIHHNPKVFPEPYKFRPERFLAGGDGKFGNLKAMEQSLLPFSAGMRICAGMELGKLQYGFALASLVNAFNWTCTADGKLPDMSEDHCFILLMKNP

SEQ ID NO: 185 - protein, 480 aa, Corydalis cheilanthifolia; identical to SEQ ID NO: 161

SEQ ID NO: 186 - protein, 490 aa, Thalictrum flavum
MEESFWLVTATVIVVFAVAKFFTRSSSISKMEWPAGPKKLPIIGNLHQLGGNVFHVVLANLAKVHGSVMTIWVGSWRPMIVISDIEKAWEMLVTKSSDYSGRSFPEITKIISANWKNISCSDSGPFWTNLRKGLQGGALAPLNVISQYHLQERDMENLVKSMRVEASKNNGNIKPLDHLKQETVRLLSRLIFGQDFHDEKLVVGMHHALDDLVRISGYASLADAFKIAENLPSHKKSIREVHEVNERVKKLVRPHIVSNPPTNTYLYFLQSQKFSEDVIISAILEVYDLGVDSTASTTVWALTFLVREQEIQEKLYQEIKSVSGGRSTVKVEEVSKMPYLQAVMKESMRMKPIAPMAIPHKAQRETTLMGKKVDKDTVLMVNLYAIHHNPNVFPEPFKFMPERFLQGEDHHNGGNIKAMEQSLLPFSAGMRICAGMELGKLQLAYGLASLVNAFKWDCAVDGKLPDMSEDHCFILLMKNPLEARITPRTH

SEQ ID NO: 187 - protein, 487 aa, Thalictrum flavum
VSLWLVSATLALVVAITILIPMVTSSSSFSQMKWPTGPNKLPIIGNLHQLGGDVLHVALAKLAQVHGSVMTVWIGNWRPIIVISDIDKAWEVLVNKSSDYGARDMPEITKIASASWHTISTSDAGAFWQTVRKGLQSGAMGPLNIAAQSQFQERDMKRLIQALRDEAAQNNNIVKPLDHIKKNTVRLLTRLIFGQTFDDDKFVESMHFEIDDIIRISGYARLAEAFYYAKYLPSHKKAEREAYLVKCRVEDLVSPLLSSNPPTNSYLYFLLSQRFSEEVIIFCIFELYLLGVDSTSSTTTWALAYLIREQAIQEKLYQDTRMTLGDVDLVKIEDVSKLKYLQAVVKETMRMKPIAPLAIPHKTAKDTTLMGTKVAKGTRIMVNLYALHHNQNIWTNPYKFMPERFLQGEDGSATNKTMEQSFLPFSAGMRICAGMDLGKLQFAFALANLVNAFKWSCVEEGKFPDMSEELSFVLLMKTPLEAKITAR

SEQ ID NO: 188 - protein, 486 aa, Thalictrum flavum
MEVNLWLVSATFATLLAITTLIRMFKSSSQMKWPSGPKTLPIIGNMHQLGGDLLHVVLAKLAKVHGGVMTIWIGSWRPIIVVTDIDKVWEVLVSKSADYAARDFPEFTNFVTASRHTISSSDLGAFWQTLRKGLQNGALGPINIAAQSQFQERDMKQMTQAMVDEAGRNNNIVKPMEHIKKNSVRLLTRLIFGETFDDDEFVDSMLYDVDDVIRIGGFARLAEAFYYAKYLPGHRKAVREANLLKLRVEKLIRPFFSSNPPKNSYLYFLLSQNIPEEVIIFCIFELYCLGVDSTSSTTTWALAYLVHEQAVQEKLYQEIRMTLGDVDQVRIEDVSKMKYLQAVVKETMRMKPIAPFAIPHMTAKDTTLMGTKVAKGTSIMVNLYALHHNPDIWTEPYKFIPERFMQGEDGSATNKAMERSFLPFGAGMRTCAGMDLGKLQFAFVLANLVNAFKWSCVEEGKLPDLSEDLAFVLLMKTPLEAKITPR

SEQ ID NO: 189 - protein, 486 aa, Hydrastis canadensis
IELGLWLGGAIVAIVLSTILFRSSSSSSSFSSQTKWPAGPKKLPIIGNMHQLGGDVLHVALDKLSKIHGGVFTFWIGSWRPVIVISDIDKAWEVLVNKSSDYSARDMPEITKIASASWHTISTSDSGPFWQNVRKGLQGGAMGPLNMSAQTPFQEKDMKNLIETMKIEAENNNGIIKPLDHIKKNTVRLLSRLIFGQMFEDDKFIESMHYEIEDIIRISGYARLAEAFYYAKYLPSHKRAEKEAFLVKCRVEDLVRPLLKSNPPSNSYLYFLLSQNYPEEVIIFCIFELYLLGVDSTSSTTTWALAYLIREQAVQEKLYQDIKVTIGNANLVKVEDVNKLKYLQGVVKETMRMKPIAPLAIPHKSSKDTTLMGTKVAKGTRLMVNLYALHHNQNIWSEPFKFMPERFLEDGNNNKAMEQSFLPFSAGMRICAGMDLGKLQFAFALANLVNAFKWSCVEEGKFPDMSEELSFVLLMKNPLEARITPR

SEQ ID NO: 190 - protein, 490 aa, Xanthorhiza simplicissima
MEMSPTLLVCATVAIVFTITTIIRNLFSSSSFSQMKWPTGPKKLPVIGNLHQLGDDVLHVALAKLAKVHGSVMTIWIGSWRPVIVISDIDKAWEVLVNKSADYGARDMPEITKIASASWHTISTSDAGPFWQNVRKGLQSGAMGPLNVAAQNQFQERDMKRLVNAMSDEALNSKGIVKPLDHIKKNTVRLLTRLIFGQTFDDDKFIESMHYEIEDIIRISGYARLAEAFYYAKYLPSHKKAEREAFLVKCRVEKLVRPLLSSNPPSNSYLYFLLSQNFEEEVIIFCIFELYLLGVDSTSSTTTWALAYLIREQGAQEKLYQDIRMTLGDVDLVKIEDVSKLKYLQGVIKETMRMKPIAPLAIPHKTAKETTLVGTKVAKGTRIMVNLYALHHNENIWPEPYKFMPERFLEGEAKTAYNKAMEQSFLPFSAGMRICAGMDLGKLQFAFALANLVNAFKWSCVEEGKFPDMGEELSFVLLMKTPLEARIAPR

SEQ ID NO: 191 - protein, 490 aa, Berberis thunbergii; identical to SEQ ID NO: 190

SEQ ID NO: 192 - protein, 487 aa, Berberis thunbergii
MEFTVWVVGFNVLVVVAMTMFLLRTKSSSSTTKWPIGPKKLPIIGNLHQLGGDVLHVALAKLAKVHGGIMTIWIGSWRPVIVVSDIDKAWEVLVNKSSDYSARDMPEITKIASASWHTISSSDSGPFWQNLRKGLQNGALGPANISAQSQLQERDMKRMIGDLQKEAKINGGIVKPLDHIKKATVRLLSRLIFGHMFDDDSFIESMHHEIEDLIRISGYARLAEAFSYAKYLPSHKLAVKEAYEVKHRVEQLVRPLLTSSPPANSYLNFLLSQDYSEEVIIFCIFEIYLLGVDSTSSTTTWALSFLIHEQQVQEKLYQSIKGVTSDDDGLVKAEDLSKLQYLQAVMKETMRIKPIAPLAIPHKASKDTKLMGTKVAKGTRVMVNLYALHTKENIWSDPEKFKPERFLHGDEGANVKAMEQCFLPFSAGMRICAGMELGKLQFSIALANLVKAFKWTSVVDGELPDMSEELSFVLLMKTPLEARIIPR

SEQ ID NO: 193 - protein, 460 aa, Jeffersonia diphylla
SSWSTMKWPAGPKTLPIIGNLHQLQGDIFHKALAKLAGVHGGVMTIWLGSWSPVIVVSDIDHVWEVLVSKSFDYSARPKPDLIKIVAGDDINISDSGTFWYNLRKGLQNVPLGPVNICAQTNYQEGDIEQMIGDMQEEASSNGGIVKPLYHLKRASTRLLCRLIFGHTFHDDSFVESINNAVEKMIRLGENVHLAEAFSYTKYLPSHKRAVRRSYELKLAIQELVRPFLVSTPPPNTYLYFLLSQHHPEEVIISCIFELFVLGVDSTSSTTTWALAFLIHDQVVQEKLYQEIIQVSNGDCLLRSKDLSKMQYLQAVMKETMRMKPIAPLAIPHITSKHTTLMGTKVAKGTSVIVNLYALHHNPNIWVDPYKFMPHRFLQGQDDVNVKAMEQSFLPFSGGMRICAGMELAKLQFSLALANLVRTFKWTTVLDGNLPDMSEELSFITLMKTPLEARIICRHH

SEQ ID NO: 194 - protein, 440 aa, Nandina domestica
LHQLGGDVFHVVLANLAKVYGSVMTIWVGSWRPMIIVSDIDKAWEVLVSKSSDYSARDMPDITKIISANWKNISCSDSGPFWHNLRKGLQGGALAPLNVISQYHLQERDMQNLINSMQQEASKNNGILKPLDHLKQETVRLLSRLIFGQDFHDEKLVVGMHHALDDLVRISGYASLADAFKFAENLPSHKKSIREVHEVKERVENLVRPHIIPNPPTNTYLHFLQSQGFSEDIVISGILEVYDLGVDSTASTTVWALTFLVREQKIQEKLFEEIKKVTGGRSSVRVEEVSKMAYLQAVMKETMRMKPIAPMAIPHKTSKETSLMGRKVDKGSVIMVNLYAIHHNPEVYPEPYKFKPERFLQGSENIKAMEQSLLPFSAGMRICAGMELGKLQLAFGLASLVNAFKWDCAVDGELPDMSEDHCFILLMKNPLQARITPRTH

SEQ ID NO: 195 - protein, 488 aa, Nandina domestica
MEESFWIVSATIVVVFVIATMFRKSSSISSKTEWPAGPKKLPVIGNLHQLGGDVLHVVLANLAKVYGTVMTVWVGSWKPMIVISDIDRAWEVLVNKSNDYSGRDLPEITKIISANWKNIMTADAGPYWTSLRKGLTGHTLAPTNVASQSHLQEKDMNNLINRMKNQAASNNGIIKPLDHLKEETVRLLSRLIFGQHFEDEHFVEGIHQALDDLVRISGYASLADAFKFCENLPSHKKSISGVHEILSRVRNLVRPYIVPNPPTNTYLHFLQSQKFTEEVIIACILEVYDLGVDSTAATTVWALTFLVREPEVQEKLYREIQTVIGDRGTVKVEDISKMTYLQAVMKETMRMKPIAPMAIPHKAVRETTLMGNKIDKNTVVMVNLYAIHHNPKVFPEPYKFRPERFLAGGDGKFGNLKAMEQSLLPFSAGMRTCAGMELGKLQFGFSLANLVNAFQWDCAKKGMFPDMSDLLGFVLLMKTPLQAKIVPR

SEQ ID NO: 196 - protein, 480 aa, Nandina domestica
WLLPATLLAVIAIAKFFLGKSSTMKWPIGPKTLPIIGNMHQLGGTDLQVVLANLAKTYGTIMTIWVGSWRPMIVLSDIEKAWEVLVNKSNDYSGRDLPEITKIISANWKNIMTADAGPYWTSLRKGLTGHTLAPTNVASQSHLQEKDMNNLINRMKNQAASNNGIIKPLDHLKEETVRLLSRLIFGQHFEDEHFVEGIHQALDDLVRISGYASLADAFKFCENLPSHKKSISGVHEILSRVRNLVRPYIVPNPPTNTYLHFLQSQKFTEEVIIACILEVYDLGVDSTAATTVWALTFLVREPEVQEKLYREIQTVIGDRGTVKVEDISKMTYLQAVMKETMRMKPIAPMAIPHKAVRETTLMGNKIDKNTVVMVNLYAIHHNPKVFPEPYKFRPERFLAGGDGKFGNLKAMEQSLLPFSAGMRTCAGMELGKLQFGFSLANLVNAFQWDCAKKGMFPDMSDLLGFVLLMKTPLQAKIVPR

SEQ ID NO: 197 - protein, 472 aa, Nandina domestica
KSSPSSSTQWPSGPKTLPIIGNLHQLGGDVLHVVLAKLAKVHGNIMTIWIGSWRPVIVISDYDKAWEVLVNKSSDYSARDMPEITKIASAGWRNISSSNSGPFWHSLRKGLQNGPLGPLNISAQIFSQERDMKRMIHDMQEEAAMNGGIVKPLDHLKKASVRLLNRLIFGQNFDDDSFVESIHHETEELIRISGYARLAEAFSYAKYLPSHRRAVKEAYEGKQRVEELVRPLLSSNPPPNSFLHFLMSQDYPEEVIICCILEIYLLGVDSTSSTTTWALAFLVHNQTVQEKLYQAIKCVIDGDGGLVKTGDLSKLHYLQAVMKEAMRMKPIAPLAIPHTASKDTTLMGTKVAKGTRVMVNLYSLHHNPNIWTEPFKFMPERFLQEEFNGGSGGGGGDANVKAMEKSFLPFSAGMRICAGMDLGKLQFSFALANLVNTFKWTSVADGKLPDMSEELSLVLLMKTPLEARIVPR

SEQ ID NO: 198 - protein, 463 aa, Nandina domestica; identical to SEQ ID NO: 164

SEQ ID NO: 199 - protein, 490 aa, Nandina domestica
ISLWTVSASFLTLLALAIILPRTRNSSSIINWPPGPKTLPIIGNLHQLGGQLLHVALTNLAKVHGGVMTIWIGSWRPIIVISSPEEVWEVLVKKSPDYAARDMPEITKLITGYWHTISSSHSGQFWSNLRKGLQNGPLGPLNITTQMSFQERNIKRMISDIQEEATFNGGIVKPLEHLKKATLRLLSHIIFGQSFDDDQFIDSMHHQIEELIRINGFAPLVDAFSYAKYLPSHKRAIKETYRVKNQIEQLVRPVIASSPPANCYLHFLLSQGYSEEVVIYSIVELYSLGVDSTASTTTWALAFLIHDQTVQDKLYQDIKHIAATDALVKIEDLSALHYLEAVMKETMRMKPIAPLAIPHKTSKDTTVRGTKVAAGTCVLVNLYALHHDHKIWAKPHKFMPERFLEGNVNGGDSSGANVKVIEQSFLPFGAGMRICAGMELGKLQFSFALANLVNAFKWTSVVDGKLPDMSEELKFIMLMKTPLEARIIPR

SEQ ID NO: 200 - protein, 475 aa, Menispermum canadense; identical to SEQ ID NO: 182

SEQ ID NO: 201 - protein, 505 aa, Artificial Sequence
  Synthetic sequence
  misc_feature (1)..(62): Xaa can be any naturally occurring amino acid
  misc_feature (64)..(70): Xaa can be any naturally occurring amino acid
  misc_feature (72)..(74): Xaa can be any naturally occurring amino acid
  misc_feature (76)..(76): Xaa can be any naturally occurring amino acid
  misc_feature (78)..(78): Xaa can be any naturally occurring amino acid
  misc_feature (80)..(80): Xaa can be any naturally occurring amino acid
  misc_feature (82)..(82): Xaa can be any naturally occurring amino acid
  misc_feature (84)..(84): Xaa can be any naturally occurring amino acid
  misc_feature (86)..(94): Xaa can be any naturally occurring amino acid
  misc_feature (96)..(96): Xaa can be any naturally occurring amino acid
  misc_feature (99)..(99): Xaa can be any naturally occurring amino acid
  misc_feature (102)..(102): Xaa can be any naturally occurring amino acid
  misc_feature (104)..(106): Xaa can be any naturally occurring amino acid
  misc_feature (108)..(109): Xaa can be any naturally occurring amino acid
  misc_feature (111)..(122): Xaa can be any naturally occurring amino acid
  misc_feature (124)..(136): Xaa can be any naturally occurring amino acid
  misc_feature (140)..(145): Xaa can be any naturally occurring amino acid
  misc_feature (147)..(155): Xaa can be any naturally occurring amino acid
  misc_feature (158)..(179): Xaa can be any naturally occurring amino acid
  misc_feature (181)..(190): Xaa can be any naturally occurring amino acid
  misc_feature (192)..(200): Xaa can be any naturally occurring amino acid
  misc_feature (202)..(225): Xaa can be any naturally occurring amino acid
  misc_feature (227)..(228): Xaa can be any naturally occurring amino acid
  misc_feature (231)..(235): Xaa can be any naturally occurring amino acid
  misc_feature (238)..(258): Xaa can be any naturally occurring amino acid
  misc_feature (260)..(267): Xaa can be any naturally occurring amino acid
  misc_feature (269)..(270): Xaa can be any naturally occurring amino acid
  misc_feature (272)..(272): Xaa can be any naturally occurring amino acid
  misc_feature (275)..(276): Xaa can be any naturally occurring amino acid
  misc_feature (278)..(289): Xaa can be any naturally occurring amino acid
  misc_feature (291)..(296): Xaa can be any naturally occurring amino acid
  misc_feature (300)..(304): Xaa can be any naturally occurring amino acid
  misc_feature (306)..(306): Xaa can be any naturally occurring amino acid
  misc_feature (308)..(316): Xaa can be any naturally occurring amino acid
  misc_feature (318)..(319): Xaa can be any naturally occurring amino acid
  misc_feature (321)..(347): Xaa can be any naturally occurring amino acid
  misc_feature (350)..(353): Xaa can be any naturally occurring amino acid
  misc_feature (356)..(357): Xaa can be any naturally occurring amino acid
  misc_feature (359)..(359): Xaa can be any naturally occurring amino acid
  misc_feature (361)..(363): Xaa can be any naturally occurring amino acid
  misc_feature (365)..(368): Xaa can be any naturally occurring amino acid
  misc_feature (370)..(374): Xaa can be any naturally occurring amino acid
  misc_feature (376)..(378): Xaa can be any naturally occurring amino acid
  misc_feature (380)..(389): Xaa can be any naturally occurring amino acid
  misc_feature (392)..(395): Xaa can be any naturally occurring amino acid
  misc_feature (397)..(404): Xaa can be any naturally occurring amino acid
  misc_feature (406)..(407): Xaa can be any naturally occurring amino acid
  misc_feature (409)..(409): Xaa can be any naturally occurring amino acid
  misc_feature (411)..(411): Xaa can be any naturally occurring amino acid
  misc_feature (414)..(440): Xaa can be any naturally occurring amino acid
  misc_feature (442)..(443): Xaa can be any naturally occurring amino acid
  misc_feature (447)..(447): Xaa can be any naturally occurring amino acid
  misc_feature (449)..(449): Xaa can be any naturally occurring amino acid
  misc_feature (451)..(454): Xaa can be any naturally occurring amino acid
  misc_feature (456)..(462): Xaa can be any naturally occurring amino acid
  misc_feature (464)..(468): Xaa can be any naturally occurring amino acid
  misc_feature (470)..(470): Xaa can be any naturally occurring amino acid
  misc_feature (472)..(476): Xaa can be any naturally occurring amino acid
  misc_feature (478)..(479): Xaa can be any naturally occurring amino acid
  misc_feature (481)..(491): Xaa can be any naturally occurring amino acid
  misc_feature (493)..(505): Xaa can be any naturally occurring amino acid
XXXXXXXXXXXXXXXXXXXXXXXXXXXXXXXXXXXXXXXXXXXXXXXXXXXXXXXXXXXXXXLXXXXXXXGXXXTXWXGXWXPXIXXXXXXXXXEXLVXKSXDXXXRXXPXXXXXXXXXXXXIXXXXXXXXXXXXXKGLXXXXXXPXXXXXXXXXQEXXXXXXXXXXXXXXXXXXXXXXPXXXXXXXXXXLXXXXXXXXXFXXXXXXXXXXXXXXXXXXXXXXXXLXXAFXXXXXLPXXXXXXXXXXXXXXXXXXXXXPXXXXXXXXNXXLXFLXXQXXXXXXXXXXXXEXXXXXXDSTXXXXXWXLXXXXXXXXXQXXLXXXXXXXXXXXXXXXXXXXXXXXXXXXYLXXXXKEXXRXKXXXPXXXXHXXXXXTXXXGXXXXXXXXXXVNXXXXHXXXXXXXXPXXFXPXRFXXXXXXXXXXXXXXXXXXXXXXXXXXXFXXGMRXCXGXXXXKXXXXXXXAXXXXXFXWXXXXXGXXPXXXXXXXXXXXMXXXXXXXXXXXXX

SEQ ID NO: 202 - protein, 463 aa, Papaver bracteatum
FRRRISASTTEWPVGPKTLPIIGNLHILGGTALHVVLHKLAEVYGSVMTIWIGSWKPVIIVSDFDRAWEVLVNKSSDYSAREMPEITKIGTANWRTISSSDSGPFWATLRKGLQSVALSPQHLASQTAHQERDIIKLIKNLKDEAALNSGTVKPLDHLKKATVRLISRLIFGQDFDDDKYVEDMHDVIEFLIRISGYAQLAEVFYYAKYLPSHKRAVTGAEEAKRRVIALVRPFLQSNPATNTYLHFLKSQHYPEEVIIFAIFEAYLLGVDSTSSTTAWALAFLIREPSVQEKLYQELKNFTANNNRTMLKVEDVNKLPYLQAVVKETMRMKPIAPLAIPHKACKDTSLMGKKVDKGTKVMVNIHALHHTEKVWKEPYKFMPERFLQKQDKAMEQSLLPFSAGMRICAGMELGKLQFSFSLANLVYAFKWSCVSDGVLPDMSDLLGFVLFMKTPLEARVVPRL

SEQ ID NO: 203 - protein, 493 aa, Sanguinaria canadensis
FEKIMMSNPWILAATTAVVFISITAIFFRRKSSSMEWPTGPKTLPIIGNMHLLGGTALHVVLHNFAKIYGNVMTIWIGSWRPVIVVSDIDRAWEVLVNKSSDYSARDMPEITKIISADWKTISTSDSGPFWTNLRKGLQNVALSPHNLAAQARFQERDISKMIETLKEEAALNNGIVKPLDHLKKATVRLISRLIYGQEFDNNKYVEDMHHAIEELIRVSGYARLAEAFYYAKYLPSHKKAVRDVEEANRRVKNLVRPFLSSNPPTNCYLHFLRTQNYPEEVIIFAIFEAYLLGVDSTSSTTAWALAFLVREPNVQEKLYQELKNFTTNNDRKMLKVEDINKLQYLQAVIKETMRMKPIAPLAIPHKACKETSLMGSKVDKGTRVMVNIYALHHNQKVWKEPYKFMPERFLETDNQDGNVGKAMEQSLLPFSAGMRICAGMELGKLQFTFSLANLVNAFKWSCVSDGVLPDMSDQLGFVLLMKNPLEARIVPR

SEQ ID NO: 204 - protein, 465 aa, Sanguinaria canadensis
FFLGKSSTMKWPIGPKTLPIIGNMHQLGGTDLQVVLANLAKTYGTIMTIWVGSWRPMIVLSDIEKAWEVLVNKSSDYSGRAMPEITEIISAKGKTISTSDSGPHWSNLRKGLQNVALSPHNIAAQSRFQESDITKMIKTLKQEAASNNGIVQPLDHLKKSTVRLISRLIFGQDFDDDEYVEAMHLAVEELIRVSGYARLAEAFYYAKYLPSHKRAVSEVWEANRRVKRIVKPRLSANPPPNCYLHFLSSQDYSEEMIIFAIFEAYLLGVDSTSSTTAWALGFLIREPKVQERLYQELKNCAGENGLIKVEDINKLPYLQAVLKETMRMKPIAPLAIPHKAVRETSLAGNKVEPGTRVMVNLYAIHHNPKVWIDPHKFKPERFLQGEENGGGNLKLMEQSLLPFSAGMRTCAGMELGKLQFGFSLANLVNAFQWDCAKKGMFPDMSDLLGFVLLMKTPLQAKIVPR

SEQ ID NO: 205 - protein, 476 aa, Sanguinaria canadensis
FSNRRKSSMKWPDGPKTLPIIGNMHQLGGTAGLQVVLHKLADVYGSIMTIWIGSWRPVIVVSDIDKAWEVLVNKSSDYSARDMPEITRINTANWRTISTSDSGPFWSNLRKGLQNVALSPHNLAAQSQFQERDINRLIKNLKEEAALNDGIVKPLDHLKKATVRLLSRLIYGQNFNDDKYVETMHNEIEELIRISGYARLAEAFYYAKYLPSHKRVEKAVEEAHYRIKALISPLLSWNPPLNSYLHFLRSQNYPEEVIIFCIYEVYLLGVDSTSSTTAWALAFLVREPAVQEKLYQELNNFTHDRQMSAVKVEDVNKLPYLQAVMKETMRMKPIAPLAIPHKTCKETSLGGNKVDKGTRVMVNLHAIHHNPKVWHEPYRFLPERFLQVNKETINNGGGGGGTAKEMEQSFLPFSAGMRICAGMELGKLQFGLALANLVNAFQWSCVADGKLPDMSDLLGFVLFMKNPLEARIVPRI

SEQ ID NO: 206 - protein, 461 aa, Sanguinaria canadensis
SSKTEWPAGPKKLPVIGNLHQLGGDVLHVVLANLAKVYGTVMTVWVGSWKPMIVISDIDRAWEVLVNKSNDYSGRDLPEITKIISANWKNIMTADAGPYWTSLRKGLTGHTLAPTNVASQSHLQEKDMNNLINRMKNQAASNNGIIKPLDHLKEETVRLLSRLIFGQHFEDEHFVEGIHQALDDLVRISGYASLADAFKFCENLPSHKKSISGVHEILSRVRNLVRPYIVPNPPTNTYLHFLQSQKFTEEVIIACILEVYDLGVDSTAATTVWALTFLVREPEVQEKLYREIQTVIGDRGTVKVEDISKMTYLQAVMKETMRMKPIAPMAIPHKAVRETTLMGNKIDKNTVVMVNLYAIHHNPKVFPEPYKFRPERFLAGGDGKFGNLKAMEQSLLPFSAGMRICAGMELGKLQYGFALASLVNAFNWTCTADGKLPDMSEDHCFILLMKNPLVARIIPRV

SEQ ID NO: 207 - protein, 462 aa, Chelidonium majus
RRKSSSMKWPKGPKTLPIIGNMHLFGGTDLHVVLYNIAKVYGNVMTIWIGSWRPVIVISDIERAWEVLVNKSSDYSARDMPEITKLISSDWKTISTSDAGAFWTNLRKGLQNVALSPHNLASQFQFQESDIKKLIETIKEEAAVNNGIVKPLDHLKKAMVRLISRLVFGQDFDNDEYVEGMHHAIEELIRVSGYARLAEAFYYAKYLPSHKKAVRDVEEANRRVQKLVRPFLSLNPPTNTYLHFLRSQNYSEEVIIFAIFEAYLLGVDSTSSTTAWALAFLIREPNVQEKLYQELKNFTVKNGRDMLKVEDINKLPYLQATIKETMRMKPIAPLAIPHKACRDTSLKGSKIDKGTRVMVNIYALHHNEKIWKEPFKFMPERFLQTEGENGKAMEQSFLPFSAGMRICAGMELGKLQFNFALANLVNAFKWSCVADGVLPDMSDQLGFVLVMKTPLEARITSR

SEQ ID NO: 208 - protein, 491 aa, Chelidonium majus
IKEMIMSNLWILTLISTILAVFAAVLIIFRRRISASTTEWPVGPKTLPIIGNLHILGGTALHVVLHKLAEVYGSVMTIWIGSWKPVIIVSDFDRAWEVLVNKSSDYSAREMPEITKIGTANWRTISSSDSGPFWATLRKGLQSVALSPQHLASQTAHQERDIIKLIKNLKDEAALNSGMVKPLDHLKKATVRLISRLIYGQDFDDDKYVEDMHDVIEFLIRISGYAQLAEVFYYAKYLPSHKRAVTGAEEAKRRVIALVRPFLQSNPATNTYLHFLKSQLYPEEVIIFAIFEAYLLGVDSTSSTTAWALAFLIREPSVQEKLYQELKNFTANNNRTMLKVEDVNKLPYLQAVVKETMRMKPIAPLAIPHKACKDTSLMGKKVDKGTKVMVNIHALHHTEKVWKEPYKFMPERFLQKHDKAMEQSLLPFSAGMRICAGMELGKLQFSFSLANLVNAFKWSCVSDGVLPDMSDLLGFVLFMKTPLEARIVPRL

SEQ ID NO: 209 - protein, 465 aa, Chelidonium majus
FGRRRKSSMKWPNGPKTLPIIGNMHQLGGTALQVVLHKLADVYGSVMTIWIGSWRPVIVVSDIDKAWEVLVNKSSDYSARDMPEITRINTANWSTISTSDSGPHWSNLRKGLQNVALSPLNVAAQSQFQEKDINQVIKNLQEESALNGGIVKPLDHLKKATVRLLSRFIYGQNFDDDTYVENMHNEIEELIRISGYARLAEAFYYAKYLPSHKKVEKAVEEAHYRVKALISPFLTRNPPPNSYLHFLRSQNYPEEVIIFCIYEVYLLGVDSTSSTTAWALAYLVRESAVQEKLYQELNNFIGDRQQMGSAIKVEDVNKLQYLQAVMKETMRMKPIAPLAIPHKACKDTSLGGNKVDKGTKVMVNLHAIHHNPKVWNEPNRFKPERFLQLKDKKEMEQSYLPFSAGMRTCAGMELGKLQFGFALANLVYAFQWSCVADGKPPDMSDLLGFVLFMKTPLEARIVPRV

SEQ ID NO: 210 - protein, 466 aa, Chelidonium majus
FRKSSSISTMEWPAGPKTLPIIGNLHQLGGAALHVVLANLAKVYGSVMTIWVGAWRPMIVISDIDKAWEVLVNKSSDYSARSLPEITRIISANWKNIMTSDSGPFWQNLRKGLQGGALSPHNVMSQYQLQERDMQNLIKTMRVEASKNNGRIKPLDHLKQETVRLLSRLIFGQDFNDEKLVVGMHHALDDLVRISGYASLADAFKVAENLPSHKKSIREVHELKRRVENLVRPHIVSNPPTNTYLNFLLSQNFSEDLIISAILEVYDLGVDSTASTTVWALTFLVREQKVQEKLYQEIKNLTGGRSTVKVEEVSKMPYLQAVMKETMRMKPIAPMAIPHTAARETSLMGKKIDKGTVVMVNLYAIHHNPNIFPEPYKFMPERFLHGEEQNGGNIKEMEQSLLPFSAGMRICAGMELGKLQLGFALASLVNAFKWECAADGKLPDLSEDHCFILLMKNPLEAKITPR

SEQ ID NO: 211 - protein, 457 aa, Chelidonium majus; identical to SEQ ID NO: 167

SEQ ID NO: 212 - protein, 486 aa, Stylophorum diphyllum
LMSNPWIITAITLAVVIIMMTIFRRKSSSMKWPKGPKTLPIIGNMHLFGGTDLHVVLYNIAKVYGNVMTIWIGSWRPVIVISDIERAWEVLVNKSSDYSARDMPEITKLISSDWKTISTSDAGAFWTNLRKGLQNVALSPHNLASQFQFQESDIKKLIETIKEEGAVNNGIVKPLDHLKKAMVRLISRLIFGQDFDNDKYVEGMHHAIEELIRVSGYARLAEAFYYAKYLPSHKKAVRDVEEANRRVQKLVRPFLSLNPPTNTYLHFLRSQNYSEEVIIFAIFEAYLLGVDSTSSTTAWALAFLIREPNVQEKLYQELKNFTVKNGRDMLKVEDINKLPYLQATIKETMRMKPIAPLAIPHKACRDTSLMGSKIDKGTRVMVNIYALHHNEKIWKEPFKFMPERFLQTEGEVNGKAMEQSFLPFSAGMRICAGMELGKLQFNFALANLVNAFKWSCVADGVLPDMSDQLGFVLVMKTPLEARITPR

SEQ ID NO: 213 - protein, 467 aa, Stylophorum diphyllum
FRKSSSISTMEWPAGPKTLPIIGNLHQLGGAALHVVLANLAKAYGSVMTIWVGSWRPMIVISDFDKAWEVLVNKSSDYSARSLPEITRIISANWKNIMTSDSGPFWQNLRKGLQSGALSPHNVMSQYQLQERDMQNLIKTMRVEAFKNNGRIKPLDHLKQETVRLLSRLIFGQDFNDEKLVVGMHHALDDLVRISGYASLADAFKFAENLPSHKKSIREVHELKKRVENLVRPHIVSNPPTNTYLNFLQSQNFSEDLIISAILEVYDLGVDSTASTTVWALTFLVRELKVQEKLYQEIKNLTGGRSTVKVEEVSKMPYLQAVMKETMRMKPIAPMAIPHTAARETSLMGKKIDKGTVVMVNLYAIHHNPNIFPEPYKFMPERFLHGEEQNGGNIKEMEQSLLPFSAGMRICAGMELGKLQLGFALASLVNAFKWECAVDGKLPDMSEDHCFILLMKNPLEAKITPRT

SEQ ID NO: 214 - protein, 491 aa, Eschscholzia californica
MKILMMNNPWILTATATTLLISIFLFFTRKSSKMVWPAGPKTLPIIGNMHLLGGTALQVVLHNLAKVHGSVMTIWIGSWRPVIVVSDIERAWEVLVNKSSDYSARDMPDITKIISADWKTISTSDSGPHWTNLRKGLQNVALSPHNLAAQFQFQEKDMTKMIQTLEEEARNNNGIVKPLDHMKKATLRLISRLVFGQDFNNDKYVDDMHLAIEELIRVSGYARLAEAFYYAKYLPSHKKAVREVEEAQRRVQNLVSPFLSLNPPTNTYLHFLRSQKYDDEVIIFAIFEAYLLGVDSTSLTTAWALAFLIREPNVQEKLYQELKNFAEKNDRKIMKVEDINKLQYLQAVTKETMRMKPIAPLAIPHKACRDTSLMGKKIDKGTRVMVNIFALHHNKNVFNDPFKFMPERFMKVDSQDANGKAMEQSLLPFSAGMRICAGMELGKLQFSFALANLAYAFKWSCVADGVLPDMSDQLGFVLLMKTPLEARINRR

SEQ ID NO: 215 - protein, 466 aa, Eschscholzia californica
FFRRKSPNMAWPEGPKTLPIIGNMHLLGGTALQVVLYNLAKVHGRVMTIWIGSWRPVIVVSDIEQAWEVLVNKSSDYSARDMPDITKIVTADWRTISTSDSGPHWSNLRKGLQNIAISPNNLAAQFQFQEKDIIKMIQILQQEAKDNNGIVKPLDHLKKATIRLISRLVFGRDFEEDKYVEDMHHAIEELIRISGYARLAEAFYYAKYLPSHRKAVRYVEELKQIVKNLIRPFLSVNPPTNTYLHFLRSQNYDEEVVIFAIFETYLLGVDSTSSTTAWALAYLVREPSVQDRLHQELDHFAKQNDRKILKVEDMNKLQYLQAVIKETMRMKPIAPLAIPHKACKDTSLMGNKINKGTRVMVNLYALHHNKNVFNDPFKFMPERFLKVDNQDAKGKAMEQSLLPFSAGMRICAGMELGKLQFSFALANLIFSFKWSCVDDGILPDMSDELGFVLFMKTPLEARIVPR

SEQ ID NO: 216 - protein, 491 aa, Eschscholzia californica
MKFLIMNNPWVLFATSATLLISIFLFFRRKSPNMAWPEGPKTLPIIGNMHLLGGTALQVVLYNLAKVHGRVMTIWIGSWRPVIVVSDIEQAWEILVNKSSDYSARDMPDITKIVTADWRTISTSDSGPHWSNLRKGLQNIALSPNNLAAQFQFQEKDIIKMIQILQQEAKDNNGIVKPLDHLKKATIRLISRLVFGRDFEEDKYVEDMHHAIEELIRISGYARLAEAFYYAKYLPSHRKAVRYVEELKQIVKNLIRPFLSLNPPTNTYLHFLRSQNYDEEVVIFAIFETYLLGVDSTSSTTAWSLAYLVREPNVQDRLHQELDHFAKQNDRKILKVEDMNKLQYLQAVIKETMRMKPIAPLAIPHKACKDTSLMGNKINKGTRVMVNLYALHHNKNVFNDPFKFMPERFLKVDNQDAKGKAMEQSLLPFSAGMRICAGMELGKLQFSFALANLIFAFKWSCVDDGVLPDMSDELGFVLLMKTPLKARINPR

SEQ ID NO: 217 - protein, 491 aa, Glaucium flavum
MEELFKSNPWVITGTTLAVLILMTTMFRKKSLSMKWPKGPKTLPIIGNMHLLGGTNLQVILHNMSKVYGNVMTIWIGSWRPVIVVSDIERAWEVLVNKSSDYSGRDMPEITKIISADWKTISTSDSGPHWTNLRKGLQNVALSPHNLAAQFQFQERDICKLIETLKEEAKLNNGIVKPLDHLKKATIRLISRLVFGQDFDNSKYVEDMHHAIEELIRVSGYARLADAFYYAKYLPSQKKAVRDVEEAQRRVQRLVRPFLSLNPPTNCYLHFLRSQNYSDEVIIFAIFEAYLLGVDSTSSTTAWALAFLVREPNVQEKLYQELKNFTAKNGREMLKVEDINKLPYLQAVIKETMRMKPIAPLAIPHKACRDTSLKGRKIDKGTQIMVNIYALHHNENVWKEPFKFMPERFLQTDQDVNGKAMDQSLLPFSAGMRICAGMELGKLQFSFSLANLLNTFQWSCVADGVLPDMSDQLGFVLLMKTPLEARITPRC

SEQ ID NO: 218 - protein, 464 aa, Glaucium flavum
FANGRKSSMKWPEGPKTLPVIGNMHQLGGTALQVVLHKLADVYGSVMTIWIGSWRPVIVVSDIDRAWEVLVNKSSDYSAREMPEITRINTANWRTISTSDSGPHWSNLRKGLQNVALSPLNVAAQSQFQERDINQVIKDLQEEAALNNGIVKPLDHLKKATVRLLSRFIYGQNFHDDKYVESMHYEIEELIRISGYARLAEAFYYAKYLPSHKKLEKAVEEAHYRVKALISPLLTSDPPPNSYLHFLLSQNHPEEVIIFCIYEVYLLGVDSTSSTTAWALAFLVREPAVQEKLYQELSNFVGDRQQMGCAVKVEDVNKLQYLQAVMKETMRMKPIAPLAIPHKACKDTSLGGNKVDKGTRVMVNLHALHHNPKVWKEPNTFKPERFLELKDKEMEQSFLPFSAGMRTCAGMELGKLQFGFALANLVNAFQWTCVADGKLPDMSDLLGFVLFMKTPLEARIVPRV

SEQ ID NO: 219 - protein, 469 aa, Argemone Mexicana
LRRNKSSSSKMVWPTGPKTLPIIGNMNILGGTALHVVLHNLAKTYGNVMTIWIGSWRPVIVVSDIDRAWEVLVNKSSDYSARDMPEITKLATADWKTISSSDSGPFWTNLRKGLQNVALSPQNLSSQSKFQERDIIKTIQNLKEEAKMNNGIVKPLDHLKKAMVRLISRLIYGQDFDNDEYVEEMHHTIEELIRVSGYARLAEAFYYAKYLPSHKKAVREVLQANQRVQNLVRPLLSLNSPTNTYLHFLRSQNYEDEVIIFAIFEAYLLGVDSTSSTTAWALAYLIREPNVQEKLYEELKNFTNDNDRKMVKFEDLNKLQYLQAVVKETMRMKPIAPLAIPHKACRETSLMGRKVNQGTRVMVNIYALHHNQNVWKEPYKFNPERFLQKNQDGVDGKAMEQSLLPFSAGMRICAGMELGKLQFSFALANLVNAFKWSCVSDGVFPDMSDQLGFVLLMKTPLEAGIVPRM

SEQ ID NO: 220 - protein, 466 aa, Corydalis cheilanthifolia
FFLGKSSTMKWPIGPKTLPIIGNMHQLGGTDLQVVLANLAKTYGTIMTIWVGSWRPMIVLSDIEKAWEVLVNKSSDYSGRAMPEITEIISAKGKTISTSDSGPHWSNLRKGLQNVALSPHNIAAQSRFQESDITKMIKTLKQEAASNNGIVQPLDHLKKSTVRLISRLIFGQDFDDDEYVEAMHLAVEELIRVSGYARLAEAFYYAKYLPSHKRAVDSAWEVNRTVKRIVKPLLLVKPPTNCYLHFLTSQDYSEEVIIFAILEVYLLGVDSTSSTTAWALGFLIREPRVQEKLYQELKNFAGENGMIKVEDINKLPYLQAVLKETMRMKPIAPLAIPHKAVRETSLAGNKVEPETRVMVNIHAIHHNPEVWMDPYKFKPERFLQGEDINGGGNLKLMEQSLLPFSAGMRTCAGMELGKLQFGFSLANLVNAFQWDCAKKGMFPDMSDLLGFVLLMKTPLQAKIVPR

SEQ ID NO: 221 - protein, 462 aa, Corydalis cheilanthifolia
KSSTVKWPTGPKTLPIIGNMHQLGGTELQVTLTRLAKTYGNIMTIWVGSWRPMIVVSDIEKAWEVLVNKSSDYSGRAMPEITQIGSANWKTISTSDSGPHWSNLRKGLQNVALSPHNIAAQSRFQESDISKMIKALKQAAVANNGIVLPLDHLKKTTVRLISRLIFGQDFDDDEYVEAMHLAVEELIRVSGYARLAEAFYYAKYLPSHKRAVDSAWEVNRTVKRIVKPLLLVKPPTNCYLHFLTSQDYSEEVIIFAILEVYLLGVDSTSSTTAWALGFLIREPRVQEKLYQELKNFAGENGMIKVEDINKLPYLQAVLKETMRMKPIAPLAIPHKAVRETSLAGNKVEPETRVMVNIHAIHHNPEVWMDPYKFKPERFLQGEDINGGGNLKLMENSFLPFSAGMRICAGMELGKLHFGFSLANLVNAFQWDCAKKGKLPDMSDLLGFVLFMKTPLEAKIVPR

SEQ ID NO: 222 - protein, 461 aa, Corydalis cheilanthifolia
SSKTEWPAGPKKLPVIGNLHQLGGDVLHVVLANLAKVYGTVMTVWVGSWKPMIVISDIDRAWEVLVNKSNDYSGRDLPEITKIISANWKNIMTADAGPYWTSLRKGLTGHTLAPTNVASQSHLQEKDMNNLINRMKNQAASNNGIIKPLDHLKEETVRLLSRLIFGQHFEDEHFVEGIHQALDDLVRISGYASLADAFKFCENLPSHKKSISGVHEILSRVRNLVSAYIVPNPPTNTYLHFLQSQKFTEEVIIACILEVYDLGVDSTAATTVWALTFLVREPEVQEKLYREIQTVIGDRGTVKVEDISKMTYLQAVMKETMRMKPIAPMAIPHKAVRETTLMGNKIDKNTVVMVNLYAIHHNPKVFPEPYKFRPERFLAGGDGKFGNLKAMEQSLLPFSAGMRICAGMELGKLQYGFALASLVNAFNWTCTADGKLPDMSEDHCFILLMKNPLVARIIPRV

SEQ ID NO: 223 - protein, 463 aa, Corydalis cheilanthifolia
FFRKSSSIPKMEWPAGPKKLPIIGNLHQLGGDVFHVVLANLAKVYGSVMTIWVGSWRPMIIVSDIDKAWEVLVSKSSDYSARDMPDITKIISANWKNISCSDSGPFWHNLRKGLQGGALAPLNVISQYHLQERDMQNLINSMQQEASKNNGILKPLDHLKQETVRLLSRLIFGQDFHDEKLVVGMHHALDDLVRISGYASLADAFKFAENLPSHKKSIREVHEVKERVENLVRPHIIPNPPTNTYLHFLQSQGFSEDIVISGILEVYDLGVDSTASTTVWALTFLVREQKIQEKLFEEIKKVTGGRSSVRVEEVSKMAYLQAVMKETMRMKPIAPMAIPHKTSKETSLMGRKVDKGSVIMVNLYAIPHNPEVYPEPYKFKPERFLQGSENIKAMEQSLLPFSAGMRICAGMELGKLQLAFGLASLVNAFKWDCAVDGELPDMSEDHCFILLMKNPLQARITPR

SEQ ID NO: 224 - protein, 458 aa, Thalictrum flavum
SQMKWPTGPNKLPIIGNLHQLGGDVLHVALAKLAQVHGSVMTVWIGNWRPIIVISDIDKAWEVLVNKSSDYGARDMPEITKIASASWHTISTSDAGAFWQTVRKGLQSGAMGPLNIAAQSQFQERDMKRLIQALRDEAAQNNNIVKPLDHIKKNTVRLLTRLIFGQTFDDDKFVESMHFEIDDIIRISGYARLAEAFYYAKYLPSHKKAEREAYLVKCRVEDLVSPLLSSNPPTNSYLYFLLSQRFSEEVIIFCIFELYLLGVDSTSSTTTWALAYLIREQAIQEKLYQDTRMTLGDVDLVKIEDVSKLKYLQAVVKETMRMKPIAPLAIPHKTAKDTTLMGTKVAKGTRIMVNLYALHHNQNIWTNPYKFMPERFLQGEDGSATNKTMEQSFLPFSAGMRICAGMDLGKLQFAFALANLVNAFKWSCVEEGKFPDMSEELSFVLLMKTPLEAKITAR

SEQ ID NO: 225 - protein, 467 aa, Thalictrum flavum
FTRSSSISKMEWPAGPKKLPIIGNLHQLGGNVFHVVLANLAKVHGSVMTIWVGSWRPMIVISDIEKAWEMLVTKSSDYSGRSFPEITKIISANWKNISCSDSGPFWTNLRKGLQGGALAPLNVISQYHLQERDMENLVKSMRVEASKNNGNIKPLDHLKQETVRLLSRLIFGQDFHDEKLVVGMHHALDDLVRISGYASLADAFKIAENLPSHKKSIREVHEVNERVKKLVRPHIVSNPPTNTYLYFLQSQKFSEDVIISAILEVYDLGVDSTASTTVWALTFLVREQEIQEKLYQEIKSVSGGRSTVKVEEVSKMPYLQAVMKESMRMKPIAPMAIPHKAQRETTLMGKKVDKDTVLMVNLYAIHHNPNVFPEPFKFMPERFLQGEDHHNGGNIKAMEQSLLPFSAGMRICAGMELGKLQLAYGLASLVNAFKWDCAVDGKLPDMSEDHCFILLMKNPLEARITPR

SEQ ID NO: 226 - protein, 461 aa, Thalictrum flavum
KSSSQMKWPSGPKTLPIIGNMHQLGGDLLHVVLAKLAKVHGGVMTIWIGSWRPIIVVTDIDKVWEVLVSKSADYAARDFPEFTNFVTASRHTISSSDLGAFWQTLRKGLQNGALGPINIAAQSQFQERDMKQMTQAMVDEAGRNNNIVKPMEHIKKNSVRLLTRLIFGETFDDDEFVDSMLYDVDDVIRIGGFARLAEAFYYAKYLPGHRKAVREANLLKLRVEKLIRPFFSSNPPKNSYLYFLLSQNIPEEVIIFCIFELYCLGVDSTSSTTTWALAYLVHEQAVQEKLYQEIRMTLGDVDQVRIEDVSKMKYLQAVVKETMRMKPIAPFAIPHMTAKDTTLMGTKVAKGTSIMVNLYALHHNPDIWTEPYKFIPERFMQGEDGSATNKAMERSFLPFGAGMRTCAGMDLGKLQFAFVLANLVNAFKWSCVEEGKLPDLSEDLAFVLLMKTPLEAKITPR

SEQ ID NO: 227 - protein, 451 aa, Hydrastis canadensis
WPAGPKKLPIIGNMHQLGGDVLHVALDKLSKIHGGVFTFWIGSWRPVIVISDIDKAWEVLVNKSSDYSARDMPEITKIASASWHTISTSDSGPFWQNVRKGLQGGAMGPLNMSAQTPFQEKDMKNLIETMKIEAENNNGIIKPLDHIKKNTVRLLSRLIFGQMFEDDKFIESMHYEIEDIIRISGYARLAEAFYYAKYLPSHKRAEKEAFLVKCRVEDLVRPLLKSNPPSNSYLYFLLSQNYPEEVIIFCIFELYLLGVDSTSSTTTWALAYLIREQAVQEKLYQDIKVTIGNANLVKVEDVNKLKYLQGVVKETMRMKPIAPLAIPHKSSKDTTLMGTKVAKGTRLMVNLYALHHNQNIWSEPFKFMPERFLEDGNNNKAMEQSFLPFSAGMRICAGMDLGKLQFAFALANLVNAFKWSCVEEGKFPDMSEELSFVLLMKNPLEARITPR

SEQ ID NO: 228 - protein, 464 aa, Xanthorhiza simplicissima
FSSSSFSQMKWPTGPKKLPVIGNLHQLGDDVLHVALAKLAKVHGSVMTIWIGSWRPVIVISDIDKAWEVLVNKSADYGARDMPEITKIASASWHTISTSDAGPFWQNVRKGLQSGAMGPLNVAAQNQFQERDMKRLVNAMSDEALNSKGIVKPLDHIKKNTVRLLTRLIFGQTFDDDKFIESMHYEIEDIIRISGYARLAEAFYYAKYLPSHKKAEREAFLVKCRVEKLVRPLLSSNPPSNSYLYFLLSQNFEEEVIIFCIFELYLLGVDSTSSTTTWALAYLIREQGAQEKLYQDIRMTLGDVDLVKIEDVSKLKYLQGVIKETMRMKPIAPLAIPHKTAKETTLVGTKVAKGTRIMVNLYALHHNENIWPEPYKFMPERFLEGEAKTAYNKAMEQSFLPFSAGMRICAGMDLGKLQFAFALANLVNAFKWSCVEEGKFPDMGEELSFVLLMKTPLEARIAPR

SEQ ID NO: 229 - protein, 462 aa, Berberis thunbergii
KSSSSTTKWPIGPKKLPIIGNLHQLGGDVLHVALAKLAKVHGGIMTIWIGSWRPVIVVSDIDKAWEVLVNKSSDYSARDMPEITKIASASWHTISSSDSGPFWQNLRKGLQNGALGPANISAQSQLQERDMKRMIGDLQKEAKINGGIVKPLDHIKKATVRLLSRLIFGHMFDDDSFIESMHHEIEDLIRISGYARLAEAFSYAKYLPSHKLAVKEAYEVKHRVEQLVRPLLTSSPPANSYLNFLLSQDYSEEVIIFCIFEIYLLGVDSTSSTTTWALSFLIHEQQVQEKLYQSIKGVTSDDDGLVKAEDLSKLQYLQAVMKETMRIKPIAPLAIPHKASKDTKLMGTKVAKGTRVMVNLYALHTKENIWSDPEKFKPERFLHGDEGANVKAMEQCFLPFSAGMRICAGMELGKLQFSIALANLVKAFKWTSVVDGELPDMSEELSFVLLMKTPLEARIIPR

SEQ ID NO: 230 - protein, 464 aa, Berberis thunbergii; identical to SEQ ID NO: 228

SEQ ID NO: 231 - protein, 450 aa, Berberis thunbergii
PKKLPIIGNLHQLGGDMLHVALAKLAKVHGGIMTIWIGSWRPVIVVSDIDKAWEVLVNKSSDYSARDMPEITKITSANGHTISSSDSGPFWQNLRKGLQNGALGPANISAQSQLQERDIKRMIGELQKEAKINGGIVKPLDHIKKATVRLLSRLIFGHMFDDDSFIESMHHVIEDLIRISGYARLAEAFSYAKYLPSHKLAVKEAYEVKHRVEQLVRPLLTSSPPANSYLNFLLSQDYSEEVIIFCIFEIYLLGVDSTSSTTTWALSFLIHEQRVQEKLYQSIKGVTSDDDGLVKAEDLSKLQYLQAVMKETMRIKPIAPLAIPHKASKDTKLMGTKVAKGTRVMVNLYALHTKENIWSDPEKFKPERFLHGDEGVNAKAMEQWFLPFSAGMRICAGIELGKLQFSITLANLVKAFKWTSVVDGELPDMSEELSFVLLAKTPLEARIIPR

SEQ ID NO: 232 - protein, 455 aa, Jeffersonia diphylla
STMKWPAGPKTLPIIGNLHQLQGDIFHKALAKLAGVHGGVMTIWLGSWSPVIVVSDIDHVWEVLVSKSFDYSARPKPDLIKIVAGDDINISDSGTFWYNLRKGLQNVPLGPVNICAQTNYQEGDIEQMIGDMQEEASSNGGIVKPLYHLKRASTRLLCRLIFGHTFHDDSFVESINNAVEKMIRLGENVHLAEAFSYTKYLPSHKRAVRRSYELKLAIQELVRPFLVSTPPPNTYLYFLLSQHHPEEVIISCIFELFVLGVDSTSSTTTWALAFLIHDQVVQEKLYQEIIQVSNGDCLLRSKDLSKMQYLQAVMKETMRMKPIAPLAIPHITSKHTTLMGTKVAKGTSVIVNLYALHHNPNIWVDPYKFMPHRFLQGQDDVNVKAMEQSFLPFSGGMRICAGMELAKLQFSLALANLVRTFKWTTVLDGNLPDMSEELSFITLMKTPLEARIICR

SEQ ID NO: 233 - protein, 465 aa, Nandina domestica; identical to SEQ ID NO: 204

SEQ ID NO: 234 - protein, 469 aa, Menispermum canadense; identical to SEQ ID NO: 219

SEQ ID NO: 235 - protein, 507 aa, Artificial Sequence
  Synthetic sequence
  misc_feature (1)..(43): Xaa can be any naturally occurring amino acid
  misc_feature (45)..(46): Xaa can be any naturally occurring amino acid
  misc_feature (49)..(49): Xaa can be any naturally occurring amino acid
  misc_feature (53)..(65): Xaa can be any naturally occurring amino acid
  misc_feature (67)..(73): Xaa can be any naturally occurring amino acid
  misc_feature (75)..(77): Xaa can be any naturally occurring amino acid
  misc_feature (79)..(79): Xaa can be any naturally occurring amino acid
  misc_feature (81)..(81): Xaa can be any naturally occurring amino acid
  misc_feature (83)..(83): Xaa can be any naturally occurring amino acid
  misc_feature (85)..(85): Xaa can be any naturally occurring amino acid
  misc_feature (87)..(87): Xaa can be any naturally occurring amino acid
  misc_feature (89)..(91): Xaa can be any naturally occurring amino acid
  misc_feature (93)..(97): Xaa can be any naturally occurring amino acid
  misc_feature (99)..(99): Xaa can be any naturally occurring amino acid
  misc_feature (102)..(102): Xaa can be any naturally occurring amino acid
  misc_feature (105)..(105): Xaa can be any naturally occurring amino acid
  misc_feature (108)..(109): Xaa can be any naturally occurring amino acid
  misc_feature (111)..(112): Xaa can be any naturally occurring amino acid
  misc_feature (114)..(125): Xaa can be any naturally occurring amino acid
  misc_feature (127)..(129): Xaa can be any naturally occurring amino acid
  misc_feature (131)..(131): Xaa can be any naturally occurring amino acid
  misc_feature (133)..(134): Xaa can be any naturally occurring amino acid
  misc_feature (136)..(139): Xaa can be any naturally occurring amino acid
  misc_feature (143)..(148): Xaa can be any naturally occurring amino acid
  misc_feature (150)..(158): Xaa can be any naturally occurring amino acid
  misc_feature (161)..(161): Xaa can be any naturally occurring amino acid
  misc_feature (163)..(182): Xaa can be any naturally occurring amino acid
  misc_feature (184)..(185): Xaa can be any naturally occurring amino acid
  misc_feature (187)..(187): Xaa can be any naturally occurring amino acid
  misc_feature (189)..(192): Xaa can be any naturally occurring amino acid
  misc_feature (195)..(196): Xaa can be any naturally occurring amino acid
  misc_feature (198)..(200): Xaa can be any naturally occurring amino acid
  misc_feature (202)..(203): Xaa can be any naturally occurring amino acid
  misc_feature (205)..(221): Xaa can be any naturally occurring amino acid
  misc_feature (223)..(228): Xaa can be any naturally occurring amino acid
  misc_feature (231)..(232): Xaa can be any naturally occurring amino acid
  misc_feature (234)..(238): Xaa can be any naturally occurring amino acid
  misc_feature (241)..(270): Xaa can be any naturally occurring amino acid
  misc_feature (272)..(273): Xaa can be any naturally occurring amino acid
  misc_feature (275)..(275): Xaa can be any naturally occurring amino acid
  misc_feature (278)..(279): Xaa can be any naturally occurring amino acid
  misc_feature (281)..(292): Xaa can be any naturally occurring amino acid
  misc_feature (294)..(296): Xaa can be any naturally occurring amino acid
  misc_feature (303)..(304): Xaa can be any naturally occurring amino acid
  misc_feature (306)..(307): Xaa can be any naturally occurring amino acid
  misc_feature (309)..(309): Xaa can be any naturally occurring amino acid
  misc_feature (311)..(312): Xaa can be any naturally occurring amino acid
  misc_feature (314)..(319): Xaa can be any naturally occurring amino acid
  misc_feature (321)..(322): Xaa can be any naturally occurring amino acid
  misc_feature (324)..(350): Xaa can be any naturally occurring amino acid
  misc_feature (354)..(356): Xaa can be any naturally occurring amino acid
  misc_feature (359)..(360): Xaa can be any naturally occurring amino acid
  misc_feature (362)..(362): Xaa can be any naturally occurring amino acid
  misc_feature (368)..(368): Xaa can be any naturally occurring amino acid
  misc_feature (370)..(370): Xaa can be any naturally occurring amino acid
  misc_feature (373)..(377): Xaa can be any naturally occurring amino acid
  misc_feature (379)..(379): Xaa can be any naturally occurring amino acid
  misc_feature (381)..(381): Xaa can be any naturally occurring amino acid
  misc_feature (383)..(392): Xaa can be any naturally occurring amino acid
  misc_feature (395)..(396): Xaa can be any naturally occurring amino acid
  misc_feature (398)..(407): Xaa can be any naturally occurring amino acid
  misc_feature (409)..(410): Xaa can be any naturally occurring amino acid
  misc_feature (412)..(412): Xaa can be any naturally occurring amino acid
  misc_feature (414)..(414): Xaa can be any naturally occurring amino acid
  misc_feature (417)..(436): Xaa can be any naturally occurring amino acid
  misc_feature (438)..(442): Xaa can be any naturally occurring amino acid
  misc_feature (445)..(446): Xaa can be any naturally occurring amino acid
  misc_feature (450)..(450): Xaa can be any naturally occurring amino acid
  misc_feature (452)..(452): Xaa can be any naturally occurring amino acid
  misc_feature (454)..(455): Xaa can be any naturally occurring amino acid
  misc_feature (457)..(457): Xaa can be any naturally occurring amino acid
  misc_feature (459)..(464): Xaa can be any naturally occurring amino acid
  misc_feature (467)..(471): Xaa can be any naturally occurring amino acid
  misc_feature (473)..(473): Xaa can be any naturally occurring amino acid
  misc_feature (475)..(479): Xaa can be any naturally occurring amino acid
  misc_feature (481)..(482): Xaa can be any naturally occurring amino acid
  misc_feature (485)..(490): Xaa can be any naturally occurring amino acid
  misc_feature (492)..(495): Xaa can be any naturally occurring amino acid
  misc_feature (497)..(497): Xaa can be any naturally occurring amino acid
  misc_feature (500)..(500): Xaa can be any naturally occurring amino acid
  misc_feature (502)..(505): Xaa can be any naturally occurring amino acid
  misc_feature (507)..(507): Xaa can be any naturally occurring amino acid
XXXXXXXXXXXXXXXXXXXXXXXXXXXXXXXXXXXXXXXXXXXPXXLPXIGNXXXXXXXXXXXXXLXXXXXXXGXXXTXWXGXWXPXIXXXDXXXXXEXLVXKSXDYXXRXXPXXXXXXXXXXXXIXXXDXGXXWXXXXKGLXXXXXXPXXXXXXXXXQEXDXXXXXXXXXXXXXXXXXXXXPXXHXKXXXXRLXXRXXXGXXFXXXXXXXXXXXXXXXXXRXXXXXXLAXXFXXXXXLPXXXXXXXXXXXXXXXXXXXXXXXXXXXXXXNXXLXFLXXQXXXXXXXXXXXXEXXXLGVDSTXXTXXWXLXXLXXXXXXQXXLXXXXXXXXXXXXXXXXXXXXXXXXXXXYLQXXXKEXXRXKPIAPXAXPHXXXXXTXLXGXXXXXXXXXXVNXXAXXXXXXXXXXPXXFXPXRFXXXXXXXXXXXXXXXXXXXXMXXXXXPFXXGMRXCXGXXLXKXXXXXXLAXXXXXFXWXXXXXGXXPDXXXXXXFXXXXKXPLXAXXXXRX

SEQ ID NO: 236 - protein, 358 aa, Papaver bracteatum
MGSIDEVKKESAGETLGRLLKGEIKDEELKKLIKFLFEKRLQWGYKSSHQEQLSFNLDFIKSLKKMEMSGEIETMNKETYELPSEFLEAVFGKTVKQSMCYFKHESATIDEAEEAAHELYCERAQIKDGQTVLDIGCGQGGLVLYIAQKYKKCHVTGLTNSKAQVNYLLKQAEKLGLTNVDAILADVTQYESDKTYDRLLMIEAIEHMKNLQLFMKKLSTWMTEESLLFVDHICHKTFAHFFEAVDEDDWYSGFIFPPGCATILAANSLLYFQDDVSVVDHWVVNGMHMARSVDNWRKALDKNMEAAKEILLPGLGGSHEAVNGVVTHIRTFCMGGYEQFSMNNGDEWMVAQLLFKKK

SEQ ID NO: 237 - protein, 363 aa, Sanguinaria canadensis
GSNEEGKKKINGGLSARAGEIMGRLMKGEIGDDELKKLIRNMWERRLQWGYQPTHHQQLSFNLDFIRSLKKMDMSGEIETMNEETYELPTAFLEAAFGKTIKQSACYFKDKSTTLDEAEEASHELYCERAQIKDGQTVLDVGCGQGGLVLHIAQKYKNCRVTGITNSKAQMNYIVMQAEKLQLSNVDVILADVTKFDSDQTYDRILVIETIEHMKNIQLFMKKLSTWLKKDSLLFVDHICHKTFSHHFETLDEEDWYSGFIFPKGCVTLPSASALLYFQDDVSVVDHWVVNGMHMARSVEEWGKKLDKNMEAAREILEPGLGSKEAVNQVITHIRTFCIGGYEQFSFNNGEEWMVAQMLFKKK

SEQ ID NO: 238 - protein, 358 aa, Chelidonium majus
MGSIDEVKKESAGETLGRLLKGEIKDEELKKLIKFQFEKRLQWGYKSSHQEQLSFNLDFIKSLKKMEMSGEIETMNKETYELPSEFLEAVFGKTVKQSMCYFKHESATIDEAEEAAHELYCERAQIKDGQTVLDIGCGQGGLVLYIAQKYKNCHVTGLTNSKAQVNYLLKQAEKLGLTNVDAILADVTQYESDKTYDRLLMIEAIEHMKNLQLFMKKLSTWMTKESLLFVDHICHKTFAHFFEAVDEDDWYSGFIFPPGCATILAANSLLYFQDDVSVVDHWVVNGMHMARSVDIWRKALDKNMEAAKEILLPGLGGSHEAVNGVVTHIRTFCMGGYEQFSMNNGDEWMVAQLLFKKK

SEQ ID NO: 239 - protein, 346 aa, Chelidonium majus
AGEIMGRLMKGEIGDEELSKLVRHQWERRLQWGYKPTHEQQLACNFDFIKSLKDMDMSGEIDTMNEETYELPSAFLEATFGKTIKQSGCYFKDETTTLDEAEEASHELYCERAQIKDGQTILDIGCGQGGLVLYIAQKYKNCHVTGLTNSKAQMNYILMQAKKLQLSNVDVISADVTKFDNDKTYDRILVIEAIEHMKNIQLFLKKLSTWMKKDSLLFVDHISHKKFNHHFEALDEEDWYSGFIFPKGCVTILSSSTLLYFQDDVSVVDHWVVNGMHMARSMEEWRKKLDKNMEAAREILEPGLGSKEAVNQVITHIRTFCLGGYEQFSFNNGEEWMITQMLFKKK

SEQ ID NO: 240 - protein, 321 aa, Stylophorum diphyllum
WERRLQWGYKPTHEQQLAFNFDFIKSLKHMDMSGEIDTMNEETYELPTAFLEAAFGKTIKQSGCYFKDETTTLDEAEEASHELYCERAQIKDGQSVLDIGCGQGGLVLHIAQKYKNCHVTGLTNSKAQMNYILMQAEKLQLSNVDVISADVTKFDTDKTYDRILVIEAIEHMKNIQLFMKKLSTWMKEDSLLFVDHISHKTFNHHFEALDEEDWYSGFIFPKGCVTILSSSTLLYFQDDVSVVDHWVVNGMHMARSVEEWRKKLDKNMEAAREILEPGLGSKEAVNQVITHIRTFCLGGYEQFSFNNGEEWMITQMLFKKK

SEQ ID NO: 241 - protein, 347 aa, Eschscholzia californica
SAGEIMGRLMKGEIEDEELKKLIRHQWDRRIEWGYKPTHEKQLAFNLDFIKGLKEMVMSGEIDTMNKETYELPTAFLEAVFGKTVKQSCCYFKDENSTIDEAEEAAHELYCERAQIKDGQTVLDIGCGQGGLVLYIAEKYKNCHVTGLTNSKAQANYIEQQAEKLELTNVDVIFADVTKFDTDKTYDRILVVETIEHMKNIQLFMKKLSTWMTEDSLLFVDHISHKTFNHNFEALDEDDWYSGFIFPKGCVTILSSSTLLYFQDDVSALDHWVVNGMHMARSVEAWRKKLDETIEAAREILEPGLGSKEAVNQVITHIRTFCIGGYEQFSYNNGEEWMITQILFKKK

SEQ ID NO: 242 - protein, 358 aa, Glaucium flavum
MGSNEAQVKKESIGEIMGKLMQGEIGDEELSKRIKEIFGKRLQWGYKPTHQQQLAFNLDFIKSLKEMDMSGEIDTMNEETYELPSAFLEAAFGKTIKQSGCYFKDETTTIDEAEEASHELYCERAQIKDGQTVLDIGCGQGGLVLHIAQKYKNCHVTGLTNSKAQKNYILMQAEKLQLSNVDVILADVTKHESDKTYDRILVIETIEHMKNIQLFMKKLSTWMTEDSLLFVDHICHKTFSHHFEAIDEDDWYSGFIFPKGCVTILSASALLYFQDDVTILDHWVVNGMHMARSVDAWRKKLDKNMELAREILLPGLGSKEAVNGVITHIRTFCMGGYEQFSYNNGEEWMVAQMLFKKK

SEQ ID NO: 243 - protein, 357 aa, Argemone Mexicana
VEGMKKETRAAEEILGRLLKGEIKDEELRKLIKFQFQKRLEWGYKSTHHQQLSFNLDFIKSLKNMDMSGEIETMNKETYELPTEFLEAAFGKTMKQSGCYFKHESTTIDEAEEASHELYCERAQIKDGQTVLDIGCGQGGLVLYIAEKYKKCHVTGLTNSKAQVNYIEMQAKKLGLSNVDVILADVTKYDSDKTYDRLLMIEAIEHMKNIQLFMKKLSTWMTKDSLLFVDHICHKTFSHPFEAVDEDDWYSGFIFPPGCVTILSSDALLYFQDDVSVVDHWVINGMHMARSVEAWRKKLDKNMKAAKEILLPGLGGNHEAVNQIVTHIRTFCMGGYEQFSYNNGEEWMVAQMLFKKK

SEQ ID NO: 244 - protein, 324 aa, Corydalis cheilanthifolia
WEKRLQWGYRSTHEDQLKSNLDFVKSLKEMKMSGDIDTFNNESYELPSEFLESMFGKTIKQSACYFKHESMTIDEAEDASHELYCERAQIKDGQTVLDIGCGHGGLVLYIAQKYKNCHVTGLTNSRAQVNYIEMQSKKLNLTNVEAILADVTKHEFKTEKTFDRIILIEAIEHMKNIELFMKKLSTWMTEESLLFVDHICHKTFNHHFEAMDEEDWYSGYIFPKGCVTILSSSALLYFQSDVSVVDHWVVNGNHMARSVQEWLKKLDDNMETVRGILEPAMGGSKEAVDQVITHSRTFCMGAYEQFSFNNGEEWMVAQILFKKK

SEQ ID NO: 245 - protein, 358 aa, Thalictrum flavum
MGSNEAQVKKESIGEIMGKLMQGEIGDEELSKRIKEIFGKRLQWGYKPTHQQQLAFNLDFIKSLKEMDMSGEIDTMNEETYELPSAFLEAAFGKTIKQSGCYFKDETTTIDEAEEASHELYCERAQIKDGQTVLDIGCGQGGLVLHIAQKYKNCHVTGLTNSKAQKNYILMQAEKLQLSNVDVILADVTKHESDKTYDRILVIETIEHMKNIQLFMKKLSTWMTEDSLLFVDHICHKTFSHHFEAIDEDDWYSGFIFPKGCVTILSASALLYFQDDVTILDHWVVNGMHMARSVDAWRKKLDKNMELAREILLPGLGSKEAVNGVITHIRTFCMGGYEQFSYNNGEEWMISHVLFKKK

SEQ ID NO: 246 - protein, 356 aa, Hydrastis Canadensis
SLRQIKKIGSAMEILERLDKGLIPDEELRELVKIQWGRRLKWGYKSTHVQQLEFNLDFVKSLKQMDMSGKMEVINSESYELPVAFLRAMFGKTLKQSCCYFEDESMTLDEAETAAHELYCERAQIKDGQRVLDIGCGQGSLIIHIAQKYKNCHVTGITNSNAQKNIIEEECRNLKLSNVEVILADVTQYDTKDTFDRIILIEAVEHMKNIDLFLKKISKWMKDDGLMFIDCICHKTFGHHFEAIDEDDWYSGYIFPKGSVTLQAASTLLYFQEDVAVVDQWAVSGKHMARTVEEWLKKLDKNIDVAREILEPSLGSKEAVEKVITHSRTFCIGTSEQFSYNNGDEWMISHVLFKKK

SEQ ID NO: 247 - protein, 356 aa, Nigella sativa
MGSEQTKKESVAELLERLDRGVVPDEEFIELVKIQLDKRLQWGYKPTAEEQVAFHIGFIDALKKMEISGDMEKINSECYEVPISYHSLVFGAALKQSACYFKHDSMTIDEAEIAMHDLYCERSQIKDGQKILEIGCGQGGLLFHIAHKFKNCNVTGVTNSISQKEFIEEKCRKLEVQNIEVILADITKYETEDGFDRILIIGTVEHMKNVQLFLKKVSKWMKDDGFLFVDHVCHKLFAEQFEALDSDDWYAESLFPKGSVIIHAASTLLYFQDDISVANHWVLNGKHMAYSHERWLKNLLNNRDAAREVLQLSLGSEEAAEKFINHCRMFHLAMKEQFSYNNGEEWMVSHLLFGRK

SEQ ID NO: 248 - protein, 347 aa, Xanthorhiza simplicissima
SAMEILERLDKGLIPDEELRELVKIQWGRRLKWGYKSTHVQQLEFNLDFVKSLKQMDMSGKMEVINSESYELPVAFLRAMFGKTLKQSCCYFEDESMTLDEAETAAHELYCERAQIKDGQRVLDIGCGQGSLIIHIAQKYKNCHVTGITNSNAQKNIIEEECRNLKLSNVEVILADVTQYDTKDTFDRIILIEAVEHMKNIDLFLKKISKWMKDDGLMFIDCICHKTFGHHFEAIDEDDWYSGYIFPKGSVTLQAASTLLYFQEDVAVVDQWAVSGKHMARTVEEWLKKLDKNIDVAREILEPSLGSKEAVEKVITHSRTFCIGTSEQFSYNNGDEWMISHVLFKKK

SEQ ID NO: 249 - protein, 347 aa, Berberis thunbergii; identical to SEQ ID NO: 248

SEQ ID NO: 250 - protein, 356 aa, Jeffersonia diphylla
MDSNQPKKNESVIELLERLDGGQVSLHELKKLVLIQLQKRLQWGYKPTFEQQQAFHVDFIKSLKQMDISGDMERINAEAYELPISFLKTMFGKTLKQSACYFKDESPTLDEAEMVMNNLICERARLKDGQTILDIGCGQGSLVFHIAKKYKNSLVVGMTNSSEQKNYIEEQCRKLSLSNIKVILADVTKYEMEDRFDRVFVIEAIEHMKNIQLFLNKVSKWMKEDGILFVEHVCHKVFPEHFEELDNEDWYAEYIFPKGSVTVHAASTLLYFQDDVTVLEHWIMNGKHMGRTHEKWHKNLVKNIDIAKDVLQLAFGSKEAAEKCINHCLNLFAAMSEQFLYNNGEEWMISQIMFKK

SEQ ID NO: 251 - protein, 324 aa, Nandina domestica; identical to SEQ ID NO: 244

SEQ ID NO: 252 - protein, 351 aa, Menispermum canadense
VEGMKKETRAAEEILGRLLKGEIKDEELRKLIKFQFQKRLEWGYKSTHHQQLSFNLDFIKSLKNMDMSGEIETMNKETYELPTEFLEAAFGKTMKQSGCYFKHESTTIDEAEEASHELYCERAQIKDGQTVLDIGCGQGGLVLYIAEKYKKCHVTGLTNSKAQVNYIEMQAKKLGLSNVDVILADVTKYDSDKTYDRLLMIEAIEHMKNIQLFMKKLSTWMTKDSLLFVDHICHKTFSHPFEAVDEDDWYSGFIFPPGCVTILSSDALLYFQDDVSVVDHWVINGMHMARSVEAWRKKLDKNMKAAKEILLPGLGGNHEAVNQIVTHIRTFCMGGYEQFSYNNGEEWMVAQ

SEQ ID NO: 253 - protein, 275 aa, Cissampelos mucronata
SEFLEAVFGKTVKQSMCYFKHESATIDEAEEAAHELYCERAQIKDGQTVLDIGCGQGGLVLYIAQKYKNCHVTGLTNSKAQVNYLLKQAEKLGLTNVDAILADVTQYESDKTYDRLLMIEAIEHMKNLQLFMKKLSTWMTKESLLFVDHICHKTFAHFFEAVDEDDWYSGFIFPPGCATILAANSLLYFQDDVSVVDHWVVNGMHMARSVDIWRKALDKNMEAAKEILLPGLGGSHEAVNGVVTHIRTFCMGGYEQFSMNNGDEWMVAQLLFKKK

SEQ ID NO: 254 - protein, 321 aa, Tinospora cordifolia
ELERRLEWGYKPTHEQQTAEVVNFAQSLRKLSIAMEMDTLDTEMYEVPISFLKIMFGNTIKGSCCYFKDENTTLDEAEVAMLDLYCERSQIKDGQRVLDLGCGQGALTMHVARKYKNCYVTGITNSVSQKEYIEEQCRINNLPNVEVILADITTHETEDKFDRILVIELIEHMKNYELLLRKFSQWLTPDGFLFIEHICHKTLAYQYDPVDEDDWFTEYVFPSGTMIVPSANFLLYFQDDVTVVNHWTLSGMNYSRTHEAWLKNIDANAEAVKEIMVSFTGSEEAAVKQMNYWRGFNLSGMELYKYKNGEEWMACHILFKK

SEQ ID NO: 255 - protein, 350 aa, Cocculus trilobus
  misc_feature (80)..(80): Xaa can be any naturally occurring amino acid
KKEEVAELLRKLELGHVPDDEIKRLIKVELDRRIQWGYKPTYEQQTADVVNFAHSLRKMSIATEMDTLDSEMYEVPISFXKLMFGSTIKASCCYFKDDSTTLDEAEIAMLDLYCERSQIKDGQRLLDLGCGQGALTMHVGRKYKNCRVTGVTNSVSQKEYIEEQCKINNLTNVDVILADITTHVMDDRYDRILVIGLFEHMKNYELLLRKMSEWMTPEGLLFIEHACHKTFAYHYEPLDEDDWFTEYIFPSGTMIIPSANFLLYFQDDVALVNHWTLSGKHYSHTHEWWLKNIDANAEAVKKIMESFTGSEEAAVKQLNYWRGFNLSGMELFKYRNGEEWMASHVLFKKK

SEQ ID NO: 256 - protein, 367 aa, Artificial Sequence
  Synthetic sequence
  misc_feature (1)..(92): Xaa can be any naturally occurring amino acid
  misc_feature (94)..(97): Xaa can be any naturally occurring amino acid
  misc_feature (100)..(102): Xaa can be any naturally occurring amino acid
  misc_feature (104)..(104): Xaa can be any naturally occurring amino acid
  misc_feature (106)..(106): Xaa can be any naturally occurring amino acid
  misc_feature (110)..(114): Xaa can be any naturally occurring amino acid
  misc_feature (116)..(116): Xaa can be any naturally occurring amino acid
  misc_feature (121)..(125): Xaa can be any naturally occurring amino acid
  misc_feature (127)..(127): Xaa can be any naturally occurring amino acid
  misc_feature (131)..(133): Xaa can be any naturally occurring amino acid
  misc_feature (138)..(139): Xaa can be any naturally occurring amino acid
  misc_feature (141)..(142): Xaa can be any naturally occurring amino acid
  misc_feature (146)..(146): Xaa can be any naturally occurring amino acid
  misc_feature (148)..(148): Xaa can be any naturally occurring amino acid
  misc_feature (150)..(155): Xaa can be any naturally occurring amino acid
  misc_feature (157)..(157): Xaa can be any naturally occurring amino acid
  misc_feature (159)..(161): Xaa can be any naturally occurring amino acid
  misc_feature (163)..(163): Xaa can be any naturally occurring amino acid
  misc_feature (165)..(165): Xaa can be any naturally occurring amino acid
  misc_feature (169)..(170): Xaa can be any naturally occurring amino acid
  misc_feature (172)..(185): Xaa can be any naturally occurring amino acid
  misc_feature (187)..(189): Xaa can be any naturally occurring amino acid
  misc_feature (191)..(191): Xaa can be any naturally occurring amino acid
  misc_feature (194)..(194): Xaa can be any naturally occurring amino acid
  misc_feature (196)..(205): Xaa can be any naturally occurring amino acid
  misc_feature (208)..(214): Xaa can be any naturally occurring amino acid
  misc_feature (220)..(221): Xaa can be any naturally occurring amino acid
  misc_feature (223)..(225): Xaa can be any naturally occurring amino acid
  misc_feature (227)..(227): Xaa can be any naturally occurring amino acid
  misc_feature (229)..(229): Xaa can be any naturally occurring amino acid
  misc_feature (231)..(237): Xaa can be any naturally occurring amino acid
  misc_feature (239)..(243): Xaa can be any naturally occurring amino acid
  misc_feature (246)..(254): Xaa can be any naturally occurring amino acid
  misc_feature (256)..(257): Xaa can be any naturally occurring amino acid
  misc_feature (260)..(264): Xaa can be any naturally occurring amino acid
  misc_feature (267)..(267): Xaa can be any naturally occurring amino acid
  misc_feature (269)..(277): Xaa can be any naturally occurring amino acid
  misc_feature (283)..(283): Xaa can be any naturally occurring amino acid
  misc_feature (285)..(290): Xaa can be any naturally occurring amino acid
  misc_feature (292)..(294): Xaa can be any naturally occurring amino acid
  misc_feature (296)..(304): Xaa can be any naturally occurring amino acid
  misc_feature (306)..(306): Xaa can be any naturally occurring amino acid
  misc_feature (308)..(325): Xaa can be any naturally occurring amino acid
  misc_feature (327)..(328): Xaa can be any naturally occurring amino acid
  misc_feature (330)..(346): Xaa can be any naturally occurring amino acid
  misc_feature (348)..(352): Xaa can be any naturally occurring amino acid
  misc_feature (355)..(355): Xaa can be any naturally occurring amino acid
  misc_feature (359)..(367): Xaa can be any naturally occurring amino acid
XXXXXXXXXXXXXXXXXXXXXXXXXXXXXXXXXXXXXXXXXXXXXXXXXXXXXXXXXXXXXXXXXXXXXXXXXXXXXXXXXXXXXXXXXXXXFXXXXFGXXXKXSXCYFXXXXXTXDEAEXXXXXLXCERXXXKDGQXXLXXGCGXGXLXXXXXXKXKXXXVXGXTSNXXQXXXXXXXXXXXXXXNXXXIXADXTXXXXXXXXXXDRXXXXXXXEHMKNXXLXXXKXSXWXXXXXXXFXXXXXHKXXXXXXXXXDXXDWXXXXXFPXGXXXXXXXXXLLYFQXDXXXXXXWXXXGXXXXXXXXXWXKXXXXXXXXXXXXXXXXXXGXXEXXXXXXXXXXXXXXXXXEXXXXXNGXEWMXXXXXXXXX

SEQ ID NO: 257 - protein, 474 aa, Papaver bracteatum
  misc_feature (102)..(102): Xaa can be any naturally occurring amino acid
  misc_feature (269)..(269): Xaa can be any naturally occurring amino acid
IMGHLHLFNGSELTHQVLGSMADKYGPAFNIRFGSHQTLVVSSWEIVKECFTTNDRFFSNRPGSLAIKLMFYDADSVGYAPYGAYWRDLRKISTLKLLSNHXLETLKHLRTSEVESCFNQLYNQWKNNKVGGGGDDFALVRMDNWFGDLTFNVVARIVAGKKNFAGGATIGAQRYKEAMDEAFRLMTIFAFSDVVPSLGWLDKLRGLVGGMKRCGAEIDSIVAGWVDEHRLKRASGKGGGGHTDLEQDFIDVCLEIMEHSTLPGDDPEXVIKSTCLDMILGGSDTTTVTLTWALSLLLNNPHVLKRAREELDTHVGKDRQVDDSDMSNLVYIQAIIKETMRLYPAGPLIERRTSEDCEVGGFHVPAGTRLLVNLWKMQRDGSVYKEDPLEFRPERFFTSNADVDLKGQNYELIPFGAGRRICPGVSFAVQLMHLVLARLVHGFEMKTAGGAKVDMTESAGLISHKVTPLEVLLK

SEQ ID NO: 258 - protein, 536 aa, Sanguinaria canadensis
KKMEFLSLQFQPITIFALLLATPIFLYNLWNYGRKLNNKNKKSRKPPAPEASGGWPIMGHFHLFNGTEVTHRALGSMADKYGPAFNIRIGSHPTLVVSSWEIAKECFTTNDRLFSNRPGSLAIKLMFYDADSVGYAPYGTYWRELRKISTLKLLSNHRLETLKHLRTSEVESCFKQLHDLWRMNNKKGGSDDGSDFALVRIDNWFGDLTFNVVARIVAGKKNFAGGAASGDAGAQRYKEAMDEAFRLMTRFAFSDVVPSLGWLDKLTGLVGGMKRCGSEIDSIVASWVDEHRLKRISGKEGDDLEQDFIDVCLEILEHSTLPGDDPEVVIKSTCLDMILGGSDTTTVTLTWALSLLLDHPHVWKRAKEEVDAHVGKERQVEDSDIPNLVFIQAIVKETMRLYPAGPLIERRTMDDCEVGGFHIPGGTRLIVNLWKIQRDGSVYKEDPLEFRPERFLTSNAEVDLKGQNYELIPFGAGRRICPGVSFAVQLMHLVLARLIHDFEITMPMGAKVDMTESGGLISHKVTPLEVLLKPRL

SEQ ID NO: 259 - protein, 533 aa, Chelidonium majus
MEFLSLEPQLISIFVLLLASSIFLYNLLKNHGRKSKTSKPPAPVASGGWPIMGHLHLFNGSELTHQTLGSMADKYGPAFNIQLGSHQTLVVSSWEIVKECFTTNDRFFSNRPGSLAIKLMFYDADSVGYAPYGAYWRDLRKISTLKLLSNHRVETLKHLRTSEAESCFKQLYNQWKNNKVGGDDDEFAIVRMDNWFGDLTFNVVARIVAGKKNFAGGATSGDVGAKRYKEAMDEAFRLMTIFAFSDVVPSLGWLDKLRGLVGGMKRCGAEIDSIVGGWVDEHRLKRASRKGGDHNDLDLEQDFIDVCLEIMEHSTLPGDDPEIVIKSTCLDMILGGSDTTTVTLTWALSLLLNNPHVLKRAREELDTHVGKDRQVDDSDMSNLVYIQAIIKETMRLYPAGPLIERRTSEDCEVSGFHVPAGTRLMVNLWKMQRDGSVYKEDPLEFRPERFLTSNADVDLKGQNYELIPFGAGRRICPGVSFAVQLMHLVLARLVHGFEMKTAGGAKVDMTESAGLISHKVTPLQVLLKPRLAI

SEQ ID NO: 260 - protein, 475 aa, Stylophorum diphyllum
FKTNPNKMEFLSLEHQLIPIFALLLASIFLYNLLKNHGRKSKTSKPPAPEASGGWPIMGSLAIKLMFYDADSVGYAPYGAYWRDLRKISTLKLLSNHRLETLKHLRTSEVESCFNQLYNQWKNNKVGGGGDDFALVRMDNWFGDLTFNVVARIVAGKKNFAGGATIGAQRYKEAMDEAFRLMTIFAFSDVVPSLGWLDKLRGLVGGMKRCGAEIDSIVAGWVDEHRLKRASGKGGGGHTDLEQDFIDVCLEIMEHSTLPGDDPEIVIKSTCLDMILGGSDTTTVTLTWALSLLLNNPHVLKRAREELDTHVGKDRQVDDSDMSNLVYIQAIIKETMRLYPAGPLIERRTSEDCEVGGFHVPAGTRLLVNLWKMQRDGSVYKEDPLEFRPERFFTSNADVDLKGQNYELIPFGAGRRICPGVSFAVQLMHLVLARLVHGFEMKTAGGAKVDMTESAGLISHKVTPLEVLLKPRLRF

SEQ ID NO: 261 - protein, 508 aa, Eschscholzia californica
ASFIFLYKLFNFGKRNTKNGKPTAPEASGGRLIMGHLHLFNGTELTHRTLGSMADKYGPAFNIRFGSHKTLVVSSWKIIKECFTTNDRFFSNRPGSLAIKLMFYDADSVGYAPYGSYWRELRKISTLKLLSNHRLETLKHLRTSEVDSCFNQLMNSWAENKNRGDSDFAPVRMDDWFGDLTFNVVARIVAGKKNFAGGAARGDAGAQRYKSAMDEAFRLMTIFAYSDVIPSLGWLDKLRGLVGDMKRCGSEIDSVVESWVDEHRLKRRVSNKGGELDLEQDFIDVCLDIMEHSSLPGDDPEIVIKSTCLDMILGGSDTTTVTLTWALSLLLNHPQVLKRAKEELDSQVGKERQVEDSDIPNLPLIQAIIKETMRLYPAGPLIERRTMEDCEVAGFHVPAGTRLLVNLWKMQRDKEVWSEEPLEFRPERFLTSNTEVDLKGQHYELIPFGAGRRICPGVSFAVQLMHLVLARLLHGFEMTTPMGEKVDMTESAGLISHKITPLEVLIKP

SEQ ID NO: 262 - protein, 537 aa, Glaucium flavum
IKLTLKMEFLSLQLQPVSIFALLVASIFLYNFLIHGKKSNNKKTTKPPAPEASGGWPIMGHLHLFNENELTHRTLGSMADKYGPAFNIRFGSHPTLVVSSWDIVKECFTTNDRFFSNRPGSLAIKLMFYDADSVGYAPYGAYWRDLRKISTLKLLSNHRLETLKHLRTSEVESCFKELYNQWRNNKTGGGGDGFAPVRMDNWFGDLTFNVVARIVAGKKNFAGGAASGDAGAQRYKEAMDEAFRLMTIFAFSDVVPALGWLDKLRGLVGGMKRCGAEIDSIVAGWVDEHRLKRSSGKGSDADLEQDFIDVCLEIMEHSTLPGDDPEVVIKSTCLDMILGGSDTTTVTLTWALSLLLNNPHVLKRAREELDTNVGKDRQVDDSDIPNLVYIQAIIKETMRLYPAGPLIERRTSEDCEVGGFHVPAGTRLLVNLWKMQRDGSVYKEDPLEFSPERFLTSNADVDLKGQNYELIPFGAGRRICPGVSFAVQLMHLVLARLIHGFEMKTPEGGKVDMTESAGLISHKVTPLEVLLKPRLAI

SEQ ID NO: 263 - protein, 533 aa, Argemone Mexicana
KDMDNFLLQFQPISIAAFFVALVFLYWSYGRKSNKTLKPRAPEAAGGRPITGHLHLFYGEELTHRKLGSMADKYGPVFNIRFGSHKTLVVSNWEIVKECFTTNDRLFSNRPGTLAIKLMFYDTDSVGYAPYGNYWRELRKISTLKLLSNHRIETLKHLRTSEVESCFKQLYNQWEMKNENRVEVDKLGFASVRMDNWFGDLTFNVVARIVAGKKNFAGGAVNGDIGAQRYKVAMDESFRLMLTFAYSDVIPSLKWLDKLRGLIRDMKRCGSEIDSIVASWVEEHRLKRNSSENNNLDLEEDFIDVCLDIIESSSLPGDDPDTVIKSTCLDMILGGSDTTTVTLTWAISLILNNPHVLKRAKEELNSVVGKDRRVEDSDIPHLTYIHAIIKETMRLYPAGPLIERRTMEDCEVGGYHVPAGTRLLVNVWKMQRDGDVYKDDPLVFRPERFMTSNADVDLKGQHFELIPFGAGRRICPGVSFAVQLMHLVLARLLHEFEITTIPSEPKVDMSESGGLICHKIKPLEVLIKPRLEL

SEQ ID NO: 264 - protein, 530 aa, Corydalis cheilanthifolia
TSSRHCKRFILLLLQWQPTSIAVLLLAITIFLYTFTKSPPKTHKKLAPDATGGRPLMGHLHLFNSNELTHRTLGSMADKYGPAFNIRFGSHKTLVVSTWEIVKECFTTNDRSFSNRPGTLYIKLMFYNEDSVGYAPYGAYWRDLRKLSTLKLLSNHRLESLKHLRVSEMNECFKQLYEICNKGSKSVAVRMDNWFGDLTFNVVARIVAGKRNFASISNDVGAMRYKNAMDEAFRLMTVFSFSDVIPSLGWLDNLRGLVGDMKKAGKEIDSVVSGWIEEHREKRKRRSSGGNNRDGELEEEDFIDITLSILETSSLPGDDPDMTIKSTCLDMILGGSDTTTVTMTWALSLLLNNAHALKRAREELDLHVGRDRQVEDSDINNLVYIQAIIKETMRLYPAGPLIERMTKEDCEVGGFHIPAGTRLLVNLWKMQRDPNVWEDPLEFRPERFLTNNAEIDLKGQHFELIPFGTGRRICPGVSFALQLMHLALARLLHSFEVASPMDAKIDMTETAGLISHKVIPLEVLMTPRLD

SEQ ID NO: 265 - protein, 415 aa, Thalictrum flavum
LAIKLMFYDADSVGYAPYGAYWRDLRKISTLKLLSNHRLETLKHLRTSEVESCFKELYNQWRNNKTGGGGDGFAPVRMDNWFGDLTFNVVARIVAGKKNFAGGAASGDAGAQRYKEAMDEAFRLMTIFAFSDVVPALGWLDKLRGLVGGMKRCGAEIDSIVAGWVDEHRLKRSSGKGSDADLEQDFIDVCLEIMEHSTLPGDDPEVVIKSTCLDMILGGSDTTTVTLTWALSLLLNNPHVLKRAREELDTNVGKDRQVDDSDIPNLVYIQAIIKETMRLYPAGPLIERRTSEDCEVGGFHVPAGTRLLVNLWKMQRDGSVYKEDPLEFSPERFLTSNADVDLKGQNYELIPFGAGRRICPGVSFALPLMHLTLARLIHGFEMKLPVGVEKVDMTENGGIINRKATHLDVLLKPRL

SEQ ID NO: 266 - protein, 522 aa, Xanthorhiza simplicissima
LLHQWLPASMALVSLLVIILFSIFKKRSSKMIKAKKAPEVAGAWPLIGHLNLFSGPKLLHLVLGELTDQYGPAFMIHLGMYPTLVVSNWELLKDCFTTNDIFFSNRPVNKAIKHMFYNKESIGFTPYGSYWRELRKMTTLKLLSNHRLDLLKPLRISEMDACFRNLYELWTKDKDGNAWLLVDMSKWFGEISFNVVARIVAGKKNFGSKGDRYKTVMEEVVRLMGLRALSDAVPYLGWLDQLRGLDSAMKRAAKELDSVLESWVEEHRLKRVSVSAGTGSTVKTAKEEEEEEDFIDITLSILAENQLPGDDPDTGIKSLILDMILGGSDTSTVTLIWAMCLLLNNVHVLKRAQYELDAQIGKERQVEDSDIKNLPYIQAIIKETMRLYPAGPIIERQANEDCDVGGFHVPAGTRLWVNLWKLQRDPNVWKDDALEFRPERFLTDHADIDLKGQHLELIPFGSGRRICPGISFALQVMHLALARIIHGFELKTPNDSNIDMSGTPGLLCCKATPLQVLLTPRF

SEQ ID NO: 267 - protein, 478 aa, Nandina domestica
KKMEFLSLQFQPITIFALLLATPIFLYNLWNYGRKLNNKNKKSRKPPAPEASGGWPIMGHFHLFNGTEVTHRALGSMADKYGPAFNIRIGSHPTLVVSSWEIAKECFTTNDRLFSNRAGSLAIKLMFYDADSVGYAPYGTYWRELRKISTLKLLSNHRLETLKHLRTSEVESCFKQLHDLWRMNNKKGGSDDGSDFALVRIDNWFGDLTFNVVARIVAGKKNFAGGAASGDAGAQRYKEAMDEAFRLMTRFAFSDVVPSLGWLDKLTGLVGGMKRCGSEIDSIVASWVDEHRLKRISGKGGDDLEQDFIDVCLEILEHSTLPGDDPEVVIKSTCLDMILGGSDTTTVTLTWALSLLLDHPHVWKRAKEEVDAHVGKERQVEDSDIPNLVFIQAIVKETMRLYPAGPLIERRTMDDCEVGGFHIPGGTRLIVNLWKIQRDGSVYKEDPLEFRPERFLTSNAEVDLKGQNYELIPFGAGR

SEQ ID NO: 268 - protein, 558 aa, Artificial Sequence
  Synthetic sequence
  misc_feature (1)..(131): Xaa can be any naturally occurring amino acid
  misc_feature (134)..(134): Xaa can be any naturally occurring amino acid
  misc_feature (138)..(140): Xaa can be any naturally occurring amino acid
  misc_feature (142)..(142): Xaa can be any naturally occurring amino acid
  misc_feature (144)..(145): Xaa can be any naturally occurring amino acid
  misc_feature (149)..(149): Xaa can be any naturally occurring amino acid
  misc_feature (153)..(153): Xaa can be any naturally occurring amino acid
  misc_feature (157)..(158): Xaa can be any naturally occurring amino acid
  misc_feature (167)..(171): Xaa can be any naturally occurring amino acid
  misc_feature (173)..(173): Xaa can be any naturally occurring amino acid
  misc_feature (176)..(176): Xaa can be any naturally occurring amino acid
  misc_feature (179)..(181): Xaa can be any naturally occurring amino acid
  misc_feature (184)..(185): Xaa can be any naturally occurring amino acid
  misc_feature (187)..(207): Xaa can be any naturally occurring amino acid
  misc_feature (209)..(212): Xaa can be any naturally occurring amino acid
  misc_feature (214)..(214): Xaa can be any naturally occurring amino acid
  misc_feature (216)..(218): Xaa can be any naturally occurring amino acid
  misc_feature (230)..(230): Xaa can be any naturally occurring amino acid
  misc_feature (233)..(244): Xaa can be any naturally occurring amino acid
  misc_feature (248)..(249): Xaa can be any naturally occurring amino acid
  misc_feature (251)..(251): Xaa can be any naturally occurring amino acid
  misc_feature (253)..(254): Xaa can be any naturally occurring amino acid
  misc_feature (258)..(262): Xaa can be any naturally occurring amino acid
  misc_feature (265)..(266): Xaa can be any naturally occurring amino acid
  misc_feature (268)..(268): Xaa can be any naturally occurring amino acid
  misc_feature (270)..(270): Xaa can be any naturally occurring amino acid
  misc_feature (274)..(274): Xaa can be any naturally occurring amino acid
  misc_feature (276)..(276): Xaa can be any naturally occurring amino acid
  misc_feature (279)..(281): Xaa can be any naturally occurring amino acid
  misc_feature (284)..(287): Xaa can be any naturally occurring amino acid
  misc_feature (289)..(289): Xaa can be any naturally occurring amino acid
  misc_feature (292)..(295): Xaa can be any naturally occurring amino acid
  misc_feature (297)..(298): Xaa can be any naturally occurring amino acid
  misc_feature (302)..(302): Xaa can be any naturally occurring amino acid
  misc_feature (305)..(323): Xaa can be any naturally occurring amino acid
  misc_feature (325)..(325): Xaa can be any naturally occurring amino acid
  misc_feature (330)..(331): Xaa can be any naturally occurring amino acid
  misc_feature (333)..(333): Xaa can be any naturally occurring amino acid
  misc_feature (335)..(339): Xaa can be any naturally occurring amino acid
  misc_feature (346)..(349): Xaa can be any naturally occurring amino acid
  misc_feature (352)..(353): Xaa can be any naturally occurring amino acid
  misc_feature (364)..(364): Xaa can be any naturally occurring amino acid
  misc_feature (368)..(369): Xaa can be any naturally occurring amino acid
  misc_feature (372)..(373): Xaa can be any naturally occurring amino acid
  misc_feature (375)..(375): Xaa can be any naturally occurring amino acid
  misc_feature (377)..(384): Xaa can be any naturally occurring amino acid
  misc_feature (386)..(387): Xaa can be any naturally occurring amino acid
  misc_feature (389)..(393): Xaa can be any naturally occurring amino acid
  misc_feature (395)..(396): Xaa can be any naturally occurring amino acid
  misc_feature (398)..(398): Xaa can be any naturally occurring amino acid
  misc_feature (400)..(400): Xaa can be any naturally occurring amino acid
  misc_feature (404)..(406): Xaa can be any naturally occurring amino acid
  misc_feature (408)..(409): Xaa can be any naturally occurring amino acid
  misc_feature (411)..(411): Xaa can be any naturally occurring amino acid
  misc_feature (414)..(414): Xaa can be any naturally occurring amino acid
  misc_feature (426)..(426): Xaa can be any naturally occurring amino acid
  misc_feature (430)..(433): Xaa can be any naturally occurring amino acid
  misc_feature (436)..(436): Xaa can be any naturally occurring amino acid
  misc_feature (438)..(438): Xaa can be any naturally occurring amino acid
  misc_feature (440)..(442): Xaa can be any naturally occurring amino acid
  misc_feature (444)..(444): Xaa can be any naturally occurring amino acid
  misc_feature (449)..(449): Xaa can be any naturally occurring amino acid
  misc_feature (452)..(452): Xaa can be any naturally occurring amino acid
  misc_feature (455)..(455): Xaa can be any naturally occurring amino acid
  misc_feature (459)..(460): Xaa can be any naturally occurring amino acid
  misc_feature (462)..(466): Xaa can be any naturally occurring amino acid
  misc_feature (468)..(468): Xaa can be any naturally occurring amino acid
  misc_feature (470)..(470): Xaa can be any naturally occurring amino acid
  misc_feature (472)..(472): Xaa can be any naturally occurring amino acid
  misc_feature (475)..(475): Xaa can be any naturally occurring amino acid
  misc_feature (477)..(481): Xaa can be any naturally occurring amino acid
  misc_feature (487)..(488): Xaa can be any naturally occurring amino acid
  misc_feature (495)..(495): Xaa can be any naturally occurring amino acid
  misc_feature (498)..(558): Xaa can be any naturally occurring amino acid
XXXXXXXXXXXXXXXXXXXXXXXXXXXXXXXXXXXXXXXXXXXXXXXXXXXXXXXXXXXXXXXXXXXXXXXXXXXXXXXXXXXXXXXXXXXXXXXXXXXXXXXXXXXXXXXXXXXXXXXXXXXXXXXXXXXIKXMFYXXXSXSXXPYGXYWRXLRKXXTLKLLSNHXXXXXKXLRXSEXXXCFXXLXXXXXXXXXXXXXXXXXXXXXVXXXXWXGXXXFNVVARIVAGKXNFXXXXXXXXXXXXRYKXXMXEXXRLMXXXXXSDXXPXLXWLDXLXGLXXXMKXXXXEXDSXXXXWXXEHRXKRXXXXXXXXXXXXXXXXXXXEXDFIDXXLXIXXXXXLPGDDPXXXXKSXXLDMILGGSDTXTVTXXWAXXLXLXXXXXXXXAXXEXXXXXGXXRXVXDSDXXXLXXIXAIXKETMRLYPAGPXIERXXXXDCXVXGXXXPXGTRLXVNXWKXQRDXXVXXXXXLXFXPXRFXTXXXXXDLKGQXXELIPFGXGRXXXXXXXXXXXXXXXXXXXXXXXXXXXXXXXXXXXXXXXXXXXXXXXXXXXXXXXXXXXXX

SEQ ID NO: 269 - protein, 541 aa, Papaver somniferum
MDFSSLLLLLLNTWISAYSMAALLALVLVYNLRMTKSSSSKTTSLKGKKIITRPPAVTGAWPVFGHLHLFGSGEHPHEMLSKLAEKYGPSFTMKFGKHTTLVVSDTRVVKECFTTNDTLFSNRPSTIAFDLMTYATDSIAFTPYSPYWRELRKISTLKLLSNNRLESIKQLRTSEVSVCFKELYDLTNKKNDNGAPVPIDLKRWFDEVSNNVIMRVIFGKQNFGSKIVLGEDQEAVHYKKIMDELSRLSSLTMLSDMVPLLGWLDYFKGDLRAMKRNGKELNSILQKWLEEHKSKKSSDARQDFMDVMLSISKDTQLYGHDQDTFIKATCLAMIMGGTNSTEVALTWILSLLMNNRCALHKAREEIDLLVGKDRQVEDSDVKNLTYMNAIIKETMRLYPLGFLLERDTKEDCEVSGFNIKGGTRLLINVWKLQRDPNVWTDPMEFKPERFLTENADIDVGGQHFELLPFGAGRRVCPGVSFALQFMHLVLARLIHGYDMETLNGEDVDLSVSSGGHVNIKSTPLELILTPRLHPELYDCET

SEQ ID NO: 270 - protein, 473 aa, Papaver bracteatum
  misc_feature (102)..(102): Xaa can be any naturally occurring amino acid
  misc_feature (269)..(269): Xaa can be any naturally occurring amino acid
IMGHLHLFNGSELTHQVLGSMADKYGPAFNIRFGSHQTLVVSSWEIVKECFTTNDRFFSNRPGSLAIKLMFYDADSVGYAPYGAYWRDLRKISTLKLLSNHXLETLKHLRTSEVESCFNQLYNQWKNNKVGGGGDDFALVRMDNWFGDLTFNVVARIVAGKKNFAGGATIGAQRYKEAMDEAFRLMTIFAFSDVVPSLGWLDKLRGLVGGMKRCGAEIDSIVAGWVDEHRLKRASGKGGGGHTDLEQDFIDVCLEIMEHSTLPGDDPEXVIKSTCLDMILGGSDTTTVTLTWALSLLLNNPHVLKRAREELDTHVGKDRQVDDSDMSNLVYIQAIIKETMRLYPAGPLIERRTSEDCEVGGFHVPAGTRLLVNLWKMQRDGSVYKEDPLEFRPERFFTSNADVDLKGQNYELIPFGAGRRICPGVSFAVQLMHLVLARLVHGFEMKTAGGAKVDMTESAGLISHKVTPLEVLL

SEQ ID NO: 271 - protein, 527 aa, Sanguinaria canadensis
SSVLLHWFPASMAALLALVFLYNLIFNSPKTGNKKIIRRAPKAAGAWPVLGHLHLFGSGELPHKMLAAMAEKYGPAFTMKFGKHTTLVVSDTRVVKECFTTNDTLFANRPSTKAFDLMTYANDSVAFTPYGPYWRELRKISTLKLLSNHRLQAIKDVRASEVNICFRELSDLCDINKNKGAPVLVDMKKWFEEVSNNVVMRVIVGKQNFGTKIVRGEEEAVNYKNVMDELLRLASLSMLSDMAPLLGWLDMFQGNMSAMKRNAKKVDTILENWLEEHRKKNKKTATSDNDEQDFMDVMLSIVEETKLSGRDADTVIKATCLAMIMGGTDTTAVSLTWIVSLLMNNRYALKKAREELDALVGKDRQVEDSDLKNLVYLNAVVKETMRLYPLGTLLERETKEDCEVGGFQIQAGTRLLVNVKLQRDPNVWKDPLEFRPERFLTENADIDVGGQHFELLPFGAGRRVCPGVSFALQFMHLVLARLIHGYELGTQNDEDVDLTESPEGHVNHKASPLDLILTPRLHPKLYD

SEQ ID NO: 272 - protein, 532 aa, Chelidonium majus
MDSFLLIQWFAAFIAALLALVFLYNLVWNSSRTTKGKKIRKAPMAAGAWPILGHLHLFGTGELPHKMLSTMAEKYGSAFTMKFGKHTTLVVSDTLIVKECFTTHDTLFANRPSTTAFDLMTYANDSVAFTPYGPYWRELRKISTLKLLSNHRLQSIKEIRVSEVNVCFRELYESCKSKTDATPVLVDMKKWFEEVSNNIVMRVIVGRQNFGSKIVQGEEEAINYKKVMDELLRLASLSMLSDVAPVLGWLDMFQGNKSAMKRNAIKVDTILEGWLEEHRMKKSASGIPSAGENDQDFMDVMLSIIEETKLFGRDADTVIKATCLAMIMGGTDTTAVSLTWIVSLLMNHRHVLKKAREELDTLVGKDRQVEDSDLKNLVYMNAIVKETMRMYPLGAMLERETKEDCEVGGFQIQGGTRLLVNVWKLQRDPNVWTDPTEFKPERFLNENADIDVGGQHFELLPFGAGRRVCPGVSFALQFMHLVLARLIHGYELGTQNDADVDLTESTEGHVNHKASPLDLLLTPRLNNPKLYD

SEQ ID NO: 273 - protein, 526 aa, Stylophorum diphyllum
MDSFLLIQWFAASMAALLAFVFLYNLVWSSSRTTKGKNIRKAPMAAGAWPILGHLHLFGSGELPHKMLSTMAEKYGPAFTMKFGKHTTLVVSDTRIVKECFTTHDTLFANRPSTTAFDLMTYANDSVAFTPYGPYWRELRKISTLKLLSNHRLQSIKEIRVSEVNVCFRELYESCKSKTDATPVLVDMKKWFEEVSNNIVMRVIVGRQNFGSKIVQGEDEAVNYKKVMDELLRLASLSMLSDVAPVLGWLDMFQGNKSAMKRNAKKVDTILEGWLEEHRMKKSASGISSAGENDQDFMDVMLSIIEETKLSGRDADTVIKATCLAMIMGGTDTTAVSLTWIVSLLMNHRHVLKKAREELDALVGKDRQVEDSDLKNLVYMNAIVKETMRMYPLGAMLERETKEDCEVGGFQVQGGTRLLVNVWKLQRDPNVWTDPTEFKPERFLNENADIDVGGQHFELLPFGAGRRACPGVSFALQFMHLVLARLIHGYELGTQNDADVDLTESTEGHVNHKASPLDLLLTPRLN

SEQ ID NO: 274 - protein, 529 aa, Glaucium flavum
MDSTLVLQCFVGSMAAVSALVFLYNLIFSSSKTTKGKVLRKAPMAAGAWPILGHLHLFGSGELPHKMLSKMAEKYGPAFTLKFGKHTTLVVSDTRVVKECFTTNDTLFANRPSTTAFDLMTYANDSVAFTPYSPYWRELRKISTLKLLSNHRLQSIKEIRVSEVNVCFRELFEMSKSKTDGAAPALVDMKKWFEEVSNNIVMRVIVGRQNFGSKIVQGDAEAVNYKNVMDELLRLASLSMLSDFAPLLGWVDMFQGNKNAMKRNAKKVDTILEGWLEEHRKKNKKMSSSENDEQDFMDVMLSIIEETKLSGRDADTVIKATVLAMIMGGTDTTAVSLTWIVSLLMNNRHVLKKAREEIDAIVGKDRQVEDSDLKNFVYMNAIVKETMRLYPLGAMLERDTKEDCEVGGFQVQAGTRLLVNVWKLQRDPNVWKDPLEFRPERFLVENVDIDVGGQHFELLPFGAGRRVCPGVSFALQFMHLVLARLIHGYELETLNGEDVDLTESTEGHVNHKASPLDLLITPRLDSKVY

SEQ ID NO: 275 - protein, 508 aa, Argemone Mexicana
FLYNNTRFTKPKGNKKMIKPPRLPGARPLLGHLHLFGPGELPHKVLSTMADKYGPAFTIKFGKHTTLVVSDIHTIKECLTTNDILFSNRPSSIAFDLMTYADDSVAFAHYSPYWRELRKISTLKLLSNNRLQSIKQLRLSEVNVCFKELYSLCNNNNKSGAPVLIDMKKWFKEVTTNIVIRVIVGKQNFGSKIVRGEDQEAANYKKIMDELSRLAKLSMFSDYAPLLSLFDYFRGNVSAMKRNGKELNAMLQNWLEEHKRKKNSSISNDDEQDFMDLMLSIIDETKLYGRDADTFIKAISLSMIVGGIDTVVVTLTWILALIMKNPFALKKAQEELDFFVGKERQVEDSDLKNLVYMNAIVKETLRLYPLSCILERDTKEDCEVGGYYVEGGTRLLINAWKLQRDPNVWTDPSEFKPERFLNENADIDVGGQHYELIPFGAGRRVCPGVSFALQFMDLVLARLIHGYELGTLNGEDVDLTEKTEGQINFKATPLDLIVTPRLHPNLYD

SEQ ID NO: 276 - protein, 542 aa, Corydalis cheilanthifolia
MDSLLQWFSASMAALFALAFLYKLWSNKPKTYKGGKNTNKQAPVAAGAWPVLGHLHLFGGSELPHKMLAAMADKYGPAFTMKFGMHRTLVVSNTQIVKECFTTNDTLFSNRPSTKAFQLMTYDNESVAFTPYGPFWRELRKISTLKLLSNHRLQAIKDVRSSEVNVCFRELYSLWNTNESEGTNSDDQRQRPVLVDMKKWFEEVSNNVVIRVIVGKQNFGSKIVHGEEEALKYKQIMDEVLRLAGVSMLSDVAPLLGWLDLFQGHMSAMKRNAKEVDAMLSSWLEEHRRKRTSSARDSKGENVEQDFMDVMLSVVEENKLTGHDNDTVIKATVMAMIMGGTDTTAVSLTWIVSLLMNNRQVLKKAREELDAQVGKDRQVDDSDLKNLTYLNAIVKETMRLYPLGALLERETKEDCEVGGFHVKGGTRLLVNVWKLQRDPNFWSNPTEFKPERFLAENANVDIGGQHFELLPFGAGRRVCPGVSFALQFMHLVLARLIHGFELETPMNADVDLTESTEGHVNHKATPLDLLITPRLDSKLYLY

SEQ ID NO: 277 - protein, 480 aa, Thalictrum flavum
LGHLHLFGSGELPHKMLSKMAEKYGPAFTLKFGKHTTLVVSDTRVVKECFTTNDTLFANRPSTTAFDLMTYANDSVAFTPYSPYWRELRKISTLKLLSNHRLQSIKEIRVSEVNVCFRELFEMSKSKTDGAAPALVDMKKWFEEVSNNIVMRVIVGRQNFGSKIVQGDAEAVNYKNVMDELLRLASLSMLSDFAPLLGWVDMFQGNKNAMKRNAKKVDTILEGWLEEHRKKNKKMSSSENDEQDFMDVMLSIIEETKLSGRDADTVIKATVLAMIMGGTDTTAVSLTWIVSLLMNNRHVLKKAREEIDAIVGKDRQVEDSDLKNFVYMNAIVKETMRLYPLGAMLERDTKEDCEVGGFQVQAGTRLLVNVWKLQRDPNVWSDPSEFRPERFLSENADIDVGGQHFELLPFGAGRRVCPRVSFALQFMHLVLARLIHGYELGTQNDELVDLTESTEGHVNHMASPLDLILTPRLSNPKLYD

SEQ ID NO: 278 - protein, 532 aa, Nandina domestica
MDSLFVLLQWFSASLAAVLALAFLYNLWVKPRISDGKGNKGSTKQAPVAAGAWPVLGHLHLFGGSELPHKMLAAMADKYGPAFTMKFGTHRTLVVSNTQIVKECFTTNDTHFSNRPSTTAFHLMTYDNDSVAFTPYGPFWRELRKISTLKLLSNHRLQAIKDVRVSEVNVCFKDLYNQWKTNQNQRPVLVDMKKWFEEVSNNVVIRVIVGKQNFGSKIVRGEEEAVKYKKIMDEILRLAAVPMLSDMAPLLGWLDLFQAHKSAMKRNAKEVDNMLESWLEEHKRKRLSGVNGAEEEDFMDVMLSIMEENKFTGRDSNTVVKSTVLAMIMGGTDTTAVSLTWIFSLLMNNRHALKKAQEELDMHVGKDRQVEDSDLKNLVYLNAIVKETMRMYPLGALLERETKEDCEVGGYHVRAGTRLLVNVWKLQRDPSFWTDPTEFKPERFLTENAKTDVGGQHFELLPFGAGRRVCPGVSFALQFMHLVIARLIHGFELGTPMDADVDLTESTEGHVNHKATPLDLLIAPRLDSKVYD

SEQ ID NO: 279 - protein, 558 aa, Artificial Sequence
  Synthetic sequence
  misc_feature (1)..(64): Xaa can be any naturally occurring amino acid
  misc_feature (71)..(73): Xaa can be any naturally occurring amino acid
  misc_feature (75)..(76): Xaa can be any naturally occurring amino acid
  misc_feature (78)..(79): Xaa can be any naturally occurring amino acid
  misc_feature (81)..(83): Xaa can be any naturally occurring amino acid
  misc_feature (85)..(85): Xaa can be any naturally occurring amino acid
  misc_feature (89)..(90): Xaa can be any naturally occurring amino acid
  misc_feature (92)..(94): Xaa can be any naturally occurring amino acid
  misc_feature (97)..(97): Xaa can be any naturally occurring amino acid
  misc_feature (99)..(99): Xaa can be any naturally occurring amino acid
  misc_feature (105)..(109): Xaa can be any naturally occurring amino acid
  misc_feature (113)..(113): Xaa can be any naturally occurring amino acid
  misc_feature (116)..(116): Xaa can be any naturally occurring amino acid
  misc_feature (118)..(119): Xaa can be any naturally occurring amino acid
  misc_feature (121)..(121): Xaa can be any naturally occurring amino acid
  misc_feature (125)..(127): Xaa can be any naturally occurring amino acid
  misc_feature (129)..(130): Xaa can be any naturally occurring amino acid
  misc_feature (133)..(133): Xaa can be any naturally occurring amino acid
  misc_feature (135)..(137): Xaa can be any naturally occurring amino acid
  misc_feature (139)..(143): Xaa can be any naturally occurring amino acid
  misc_feature (145)..(147): Xaa can be any naturally occurring amino acid
  misc_feature (150)..(151): Xaa can be any naturally occurring amino acid
  misc_feature (163)..(164): Xaa can be any naturally occurring amino acid
  misc_feature (166)..(168): Xaa can be any naturally occurring amino acid
  misc_feature (170)..(171): Xaa can be any naturally occurring amino acid
  misc_feature (173)..(173): Xaa can be any naturally occurring amino acid
  misc_feature (177)..(178): Xaa can be any naturally occurring amino acid
  misc_feature (181)..(182): Xaa can be any naturally occurring amino acid
  misc_feature (184)..(211): Xaa can be any naturally occurring amino acid
  misc_feature (214)..(218): Xaa can be any naturally occurring amino acid
  misc_feature (220)..(222): Xaa can be any naturally occurring amino acid
  misc_feature (224)..(226): Xaa can be any naturally occurring amino acid
  misc_feature (228)..(229): Xaa can be any naturally occurring amino acid
  misc_feature (232)..(242): Xaa can be any naturally occurring amino acid
  misc_feature (244)..(245): Xaa can be any naturally occurring amino acid
  misc_feature (248)..(249): Xaa can be any naturally occurring amino acid
  misc_feature (253)..(254): Xaa can be any naturally occurring amino acid
  misc_feature (257)..(262): Xaa can be any naturally occurring amino acid
  misc_feature (265)..(266): Xaa can be any naturally occurring amino acid
  misc_feature (268)..(268): Xaa can be any naturally occurring amino acid
  misc_feature (270)..(272): Xaa can be any naturally occurring amino acid
  misc_feature (274)..(281): Xaa can be any naturally occurring amino acid
  misc_feature (285)..(295): Xaa can be any naturally occurring amino acid
  misc_feature (297)..(298): Xaa can be any naturally occurring amino acid
  misc_feature (301)..(302): Xaa can be any naturally occurring amino acid
  misc_feature (304)..(318): Xaa can be any naturally occurring amino acid
  misc_feature (321)..(321): Xaa can be any naturally occurring amino acid
  misc_feature (323)..(324): Xaa can be any naturally occurring amino acid
  misc_feature (326)..(334): Xaa can be any naturally occurring amino acid
  misc_feature (336)..(336): Xaa can be any naturally occurring amino acid
  misc_feature (338)..(342): Xaa can be any naturally occurring amino acid
  misc_feature (344)..(348): Xaa can be any naturally occurring amino acid
  misc_feature (351)..(351): Xaa can be any naturally occurring amino acid
  misc_feature (354)..(358): Xaa can be any naturally occurring amino acid
  misc_feature (360)..(360): Xaa can be any naturally occurring amino acid
  misc_feature (364)..(366): Xaa can be any naturally occurring amino acid
  misc_feature (368)..(374): Xaa can be any naturally occurring amino acid
  misc_feature (376)..(377): Xaa can be any naturally occurring amino acid
  misc_feature (379)..(379): Xaa can be any naturally occurring amino acid
  misc_feature (382)..(385): Xaa can be any naturally occurring amino acid
  misc_feature (389)..(389): Xaa can be any naturally occurring amino acid
  misc_feature (393)..(393): Xaa can be any naturally occurring amino acid
  misc_feature (397)..(398): Xaa can be any naturally occurring amino acid
  misc_feature (400)..(401): Xaa can be any naturally occurring amino acid
  misc_feature (403)..(404): Xaa can be any naturally occurring amino acid
  misc_feature (406)..(407): Xaa can be any naturally occurring amino acid
  misc_feature (411)..(411): Xaa can be any naturally occurring amino acid
  misc_feature (413)..(413): Xaa can be any naturally occurring amino acid
  misc_feature (416)..(420): Xaa can be any naturally occurring amino acid
  misc_feature (423)..(423): Xaa can be any naturally occurring amino acid
  misc_feature (425)..(425): Xaa can be any naturally occurring amino acid
  misc_feature (430)..(431): Xaa can be any naturally occurring amino acid
  misc_feature (433)..(437): Xaa can be any naturally occurring amino acid
  misc_feature (443)..(443): Xaa can be any naturally occurring amino acid
  misc_feature (445)..(446): Xaa can be any naturally occurring amino acid
  misc_feature (448)..(448): Xaa can be any naturally occurring amino acid
  misc_feature (452)..(458): Xaa can be any naturally occurring amino acid
  misc_feature (460)..(460): Xaa can be any naturally occurring amino acid
  misc_feature (463)..(463): Xaa can be any naturally occurring amino acid
  misc_feature (468)..(470): Xaa can be any naturally occurring amino acid
  misc_feature (472)..(474): Xaa can be any naturally occurring amino acid
  misc_feature (476)..(477): Xaa can be any naturally occurring amino acid
  misc_feature (480)..(481): Xaa can be any naturally occurring amino acid
  misc_feature (484)..(484): Xaa can be any naturally occurring amino acid
  misc_feature (492)..(492): Xaa can be any naturally occurring amino acid
  misc_feature (495)..(495): Xaa can be any naturally occurring amino acid
  misc_feature (497)..(497): Xaa can be any naturally occurring amino acid
  misc_feature (500)..(500): Xaa can be any naturally occurring amino acid
  misc_feature (502)..(502): Xaa can be any naturally occurring amino acid
  misc_feature (504)..(504): Xaa can be any naturally occurring amino acid
  misc_feature (507)..(507): Xaa can be any naturally occurring amino acid
  misc_feature (511)..(511): Xaa can be any naturally occurring amino acid
  misc_feature (514)..(517): Xaa can be any naturally occurring amino acid
  misc_feature (519)..(523): Xaa can be any naturally occurring amino acid
  misc_feature (526)..(531): Xaa can be any naturally occurring amino acid
  misc_feature (533)..(539): Xaa can be any naturally occurring amino acid
  misc_feature (542)..(558): Xaa can be any naturally occurring amino acid
XXXXXXXXXXXXXXXXXXXXXXXXXXXXXXXXXXXXXXXXXXXXXXXXXXXXXXXXXXXXXXXXGHLHLFXXXEXXHXXLXXXAXKYGXXFXXXFGXHXTLVVSXXXXXKECXTTXDXXFXNRPXXXAXXLMXYXXXSXXXXXYXXXWRXXRKISTLKLLSNXXLXXXKXXRXSEVXXCFXXLXXXXXXXXXXXXXXXXXXXXXXXXXXXXWFXXXXXNXXXRXXXGXXNFXXXXXXXXXXXAXXYKXXMDEXXRLXXXXXXSDXXPXLXXXDXXXXXXXXMKRXXXXXXXXXXXWXXEHXXKXXXXXXXXXXXXXXXDFXDXXLXXXXXXXXXGXDXXXXXKXXXXXMIXGGXXXXXVXLTWXXXLXXXXXXXLXXAXEEXXXXVGKXRQVXDSDXXNXXYXXAXXKETXRXYPXXXXXERXTXEDCEXXGXXXXXGTRLLXNXXKXQRDXXXXXXXPXEFXPERFXXXNXXXDXXGQXXELXPFGAGRRXCPXVXFAXQXMXLVXARLXHGXXXXTXXXXXVDXXXXXXGXXXXXXXPLXXXXXXXXXXXXXXXXX

SEQ ID NO: 280 - protein, 683 aa, Papaver bracteatum
MGSNNLANSIESMLGISIGSEYISDPIFIMVTTVASMLIGFGFFVYMKSSSSQSKPIETYKPIIDKEEEEIEVDPGKIKLTIFFGTQTGTAEGFAKALAEEIKAKYKKAVVKVVDLDDYAAEDDQYEEKLKKESLVFFMVATYGDGEPTDNAARFYKWFTQEHERGDWLQQLTYGVFGLGNRQYEHFNKIAVDVDEQLGKQGAKRIVQVGLGDDDQCIEDDFTAWRELLWTELDQLLKDEDAAPSVATPYIATVPEYRVVIHDTTVASLEEKHINTVNGDVAFDILHPCRAIVAQQRELHKPKSDRSCIHLEFDILGSSLTYETGDHVGVYAENCDETVEEAGKLLGQPLDLLFSIHTDKEDGSPQGSSLPPPFPGPCTLRSALARYADLLNPPRKASLIALSAHASVPSEAERLRFLSSPLGKNEYSKWVVGSQRSLLEIMAEFPSAKPPLGVFFAAVAPRLPPRYYSISSSPKFAPSRIHVTCALVYGESPTGRVHRGVCSTWMKHAVPQDSWAPIFVRTSNFKLPADPSTPIIMVGPGTGLAPFRGFLQERMALKENGAQLGPAVLFFGCRNRDMDFIYEDELNKFVEQGVISELVIAFSREGEKKEYVQHKMMEKATDVWNVISGDGFLYVCGDAKGMARDVHRTLHTIAQEQGPMESSAAEAAVKKLQVEGRYLRDVW

SEQ ID NO: 281 - protein, 655 aa, Papaver bracteatum
  misc_feature (210)..(210): Xaa can be any naturally occurring amino acid
SVFIGCGFLYIWRRSFRKSSKIVEVPKTGFTKEPEPEIDDGKKKVTIFFGTQTGTAEGFAKALSEEAKARYDKAVFKVVDLDDYAADDDEFEEKLKKENLALFFLATYGDGEPTDNAARFYKWFTEVAKEKEPWLPNLNFGVFGLGNRQYEHFNKVAKVVDEIIVELGGKRLVPVGLGDDDQCIEDDFTAWRELVWPELDQLLLDENDSXSVSTPYAAAVAEYRVVFHDSADASLQDKNWSNANGYAVYDALHPCRANVAVRRELHTPASDRSCIHLEFDISGTGLTYETGDHVGVYSENCMETVEEAERLLGLSSDTVFSIHVDNEDGTPITGSALPPPFPSPSTLRTALTKYADLLNFPKKAALHALAAHASDPKEAERLRFLASPAGKDEYAQWVVASQRSLLEVMAEFPSAKPPLGVFFAAIAPRLQPRFYSISSSNRMAPSRIHVTCALVNERTPAGRIHKGVCSTWMKNSVPSEESRHCSWAPVFVRQSNFKLPADSTVPIIMIGPGTGLAPFRGFMQERLALKEAGVELGAAVLFFGCRNRSMDFIYEDELNNFVESGAISELVVAFSREGPTKEYVQHKMTEKASDIWNMISQGAYLYVCGDAKGMAKDVHRTLHTIVQEQGSLDSSKTEMLVKNLQMDGRYLRDVW

SEQ ID NO: 282 - protein, 685 aa, Sanguinaria canadensis
ASNFASSLESMFGISLGSEYVSEPILIIITTTAAVLIGLGFFIWMKSYTPSKQVEPLKPVSFFKEEEEVEVDPGKTKITIFFGTQTGTAEGFAKALAEEIKARYEKTVVKVVDLDDYAVEDDLYEEKLKKETLAFFMVATYGDGEPTDNAARFYKWFTQEHERGVWLQQLTYGVFGLGNRQYEHFNKIANVLDEQLREQGAKRLIPVGLGDDDQCIEDDFTAWRELLWTELDQLLRDEDGANTVSTPYTAVVPEYRVVIHDPTVTALEDKHSSTANGNAFDIHHPCRANVAVQRELHKPDSDRSCIHLEFDISGTSLIYETGDHVGVYAENCDETVEEGGKMLGQPMDLLFSLHTDKEDGTPLGSSLPPPFPGPCTLRTALARYADLLNPPRKAALVALAAHASVPSEAERLKFLSSPQGKDEYSQWVVGSQRSLLEVMAEFPSAKPPLGVFFAAVAPRLQPRYYSISSSPRFAPSRIHVTSALVYGPSPTGRIHKGVCSTWMKHAVALEKSHDCSWAPIFVRTSNFKLPADPSIPIIMVGPGTGLAPFRGFLQERLALKEDGAQLGSAMLFFGCRNRRMDFIYEDELNNFVEKGVISELIVAFSREGEKKEYVQHKMMEKAAQLWSVISSGGYLYVCGDAKGMARDVHRTLHTIAQEQGCMDSSGAESTVKKLQMEGRYLRDVW

SEQ ID NO: 283 - protein, 677 aa, Sanguinaria canadensis
VFGISVGSSSEPILLIITTSVAVLIGIAFFLWIRSSGKESTLKPVEDFNKSSTKKEEEDDVLDPGKTKLTIFFGTQTGTAEGFAKALAEEIKAKYEKAVVKVVDLDDYAAEDDLYEEKLKKETMAFFIVATYGDGEPTDNAARFYKWFTQEHERGPWLPQLTYGVFGLGNRQYEHFNKIAKVVDEQLNEQGAKRLVPVGLGDDDQCIEDDFTAWRESLWTELDQLLRDEDTANTVTTPYTASVPEYRVVIHDPSFTPLEEKHLNMTNGNVAFDIHHPCRANVAVQKELHKPDSDRSCIHMEFDISGTGLTYETGDHVGVFAENYDEIVEEGGKLLGQPMDLLFSVHTDKEDGTPQGSSLPPPFPGPCTVRTALARYADLLTPPRKAALVALAAHASVPSEADRLKFLSSPAGKDEYSQWVVGSQRSLLEVMAEFPSAKPPLGVFFAAVAPRLQPRYYSISSSPKFAPSRIHVTCALVYGPSPTGRIHRGVCSTWMKNAVPLEKSQDCSWAPVFVRTSNFKLPTDPSIPIIMVGPGTGLAPFRGFLQERAALKEDGVELGPAVLFFGCRNRRMDFIYEDELNNFTEQGVVSELIVAFSREGETKEYVQHKMTERATYIWSLISSGAYFYVCGDAKGMARDVHRTLHTIAQEQGGMSSSEAEATVKKLQMDGRYLRDVW

SEQ ID NO: 284 - protein, 688 aa, Chelidonium majus
MASSNFATSIESIFGISVGSEYVSEPMLIIITTSVAVLIGLGFFMLMKSSSSAKPIEPLKPMSFMKEEEDVEVDPGKTKITIFFGTQTGTAEGFAKALSEEIKARYDKAVVKVVDLDDYAAEDDLYEEKLKKETLAFFMLATYGDGEPTDNAARFFKWFTQEHERGVWLQHLTYGVFGLGNRQYEHFNKIANVVDEQLNEQGAKRIVPVGLGDDDQCIEDDFTAWRELLWTELDQLLRDEDSANTASTPYTAVVPEYRVAIHEPTVKAVLDKQFSMTNGNAAFDIHHPCRANVAVQRELHKPDSDRSCIHLEFDISDTSLAYETGDHVGVYAENCDEIVEEGGKLLGQPMDLLFSLHTDKEDGTPLGSSLPPPFPGPCTLRTALARYADLLNPPRKAALIALAAHASVPSEAERLKFLSSPQGKDEYSQWIVASQRSLLEVMAEFPSAKPPLGVFFAAVAPRLQPRYYSISSSPRFAPSRIHVTCALVYGPSPTGRIHRGVCSTWMKHAIGLEKSQDCSWAPIFVRTSNFKLPADPSIPIVMVGPGTGLAPFRGFLQERLALKQNGAQLGPAMLFFGCRNRRMDFIYEDELNNFVEQEAISELIVAFSREGEKKEYVQHKMMERAAHLWSVISSGGYLYVCGDAKGMARDVHRTLHTIAQEQGGLDSSGAESTVKKLQMDGRYLRDVW

SEQ ID NO: 285 - protein, 610 aa, Chelidonium majus
AKPIEPLKPMSFMKEEEDVEVDPGKTKITIFFGTQTGTAEGFAKALSEEIKARYDKAVVKVVDLDDYAAEDDLYEEKLKKETLAFFMLATYGDGEPTDNAARFFKWFTQEHERGVWLQHLTYGVFGLGNRQYEHFNKIANVVDEQLNEQGAKRIVPVGLGDDDQCIEDDFTAWRELLWTELDQLLRDEDSANTASTPYTAVVPEYRVAIHEPTVKAVLDKQFSMTNGNAAFDIHHPCRANVAVQRELHKPDSDRSCIHLEFDISDTSLAYETGDHVGVYAENCDEIVEEGGKLLGQPMDLLFSLHTDKEDGTPLGSSLPPPFPGPCTLRTALARYADLLNPPRKAALIALAAHASVPSEAERLKFLSSPQGKDEYSQWIVASQRSLLEVMAEFPSAKPPLGVFFAAVAPRLQPRYYSISSSPRFAPSRIHVTCALVYGPSPTGRIHRGVCSTWMKHAIGLEKSQDCSWAPIFVRTSNFKLPADPSIPIVMVGPGTGLAPFRGFLQERLALKQNGAQLGPAMLFFGCRNRRMDFIYEDELNNFVEQEAISELIVAFSREGEKKEYVQHKMMERAAHLWSVISSGGYLYVCGDAKGMARDVHRTLHTIAQEQ

SEQ ID NO: 286 - protein, 664 aa, Chelidonium majus
LLMVLTTAIAVFIGCGFLYVWRRSLKKSSKIIEAPKSLIVKQEPESEIDDGKKKVTVFFGTQTGTAEGFAKALAEEAKARYDKAIFKVVDLDDYAADDDEFEEKLKKESLTLFFLATYGDGEPTDNAARFFKWFTEGKEKEIGLQSLHYGVFGLGNRQYEHFNKVAKVVDEIISEQGGKRIVPVGLGDDDQCIEDDFTAWRELLWPELDQLLLDENDSTSVSTPYTAAVAEYRVVFHDAADASLQEKNWSNANGHAVHDIQHPCRANVAVRRELHTPESDRSCIHLEFDISGTGLSYETGDHVGVYSENCIEIVEEAERLLGHSSDTLFSIHVDKEDGTPISGSALPPPFPSPCTLRTALTRYADLLNFPKKAALHALAAYASDPKEAERLRFLASPAGKDEYAQWVVASQRSLLEVMAEFPSAKPPLGVFFAAIAPRLQPRYYSISSSHRMSQSRIHVTCALVYETTPAGRVHEGVCSTWMKNSKPSEESHDCSWAPIFVRQSNFKLPADPTVPIIMIGPGTGLAPFRGFMQDRLAQKEAGVNLGPAVLFFGCRNRRMDYIYEEELNGFVEAGAISELVVAFSREGPTKEYVQHKMMEKASDIWNMISQGAYLYVCGDAKGMARDVHRTLHTIVQEQGSLDSSKTEMLVKNLQMDGRYLRDVW

SEQ ID NO: 287 - protein, 560 aa, Stylophorum diphyllum
KLKKETLAFFMLATYGDGEPTDNAARFFKWFTQEHERGVWLQHLTYGVFGLGNRQYEHFNKIANVVDEQLNEQGAKRIVPVGLGDDDQCIEDDFTAWRELLWTELDQLLRDEDSANTVSTPYTAAVPEYRVAIHEPTVKAVLDKQFSMTNGNAAFDIHHPCRANVAVQRELHKPDSDRSCLHLEFDISDTSLTYETGDHVGVYAENFDEIVEEGGKMLGQPMDLLFSLHTDKEDGTPLGSSLPPPFPGPCTLRTALARYADLLNPPRKAALIALAAHASVPSEAERLKFLSSPQGKDEYSQWIVASQRSLLEVMAEFPSAKPPLGVFFAAVVPRLQPRYYSISSSPRFAPSRIHVTCALVYGPSPTGRIHRGVCSTWMKHAIGLEKSQDCSWAPIFVRTSNFKLPADPSIPIVMVGPGTGLAPFRGFLQERLALKQNGAQLGPAMLFFGCRNRRMDFIYEDELNNFVEQEAISELITAFSREGEKKEYVQHKMMERAAQLWSVISSGGYLYVCGDAKGMARDVHRTLHTIAQEQGGLDSSGAESTVKKLQMDGRYLRDVW

SEQ ID NO: 288 - protein, 664 aa, Stylophorum diphyllum
LLMVLTTAIAVFIGCGFLYVWRRSLKKSSKIVEAPKSLIVKQEPESEIDDGKKKVTIFFGTQTGTAEGFAKALAEEAKARYDKAIFKVVDLDDYAADDDEFEEKLKKESLTLFFLATYGDGEPTDNAARFFKWFTEGKEKEIGLQNLHYGVFGLGNRQYEHFNKVAKVVDEIISEQGGKRIVPVGLGDDDQCIEDDFTAWRELLWPELDQLLLDENDATSVSTPYTAAVAEYRVVFHDAADASLQEKNWSNANGHAVHDIQHPCRANVAVRRELHTPESDRSCIHLEFDISGTGLSYETGDHVGVYSENCMEIVEEAERLLGHSSDTLFSIHVDKEDGTPISGSALPPPFPSPCTLRTALTRYADLLNFPKKAALHALAAYASDPKEAERLRFLASPAGKDEYAQWVVASQRSLLEVMAEFPSAKPPLGVFFAAIAPRLQPRYYSISSSHRMSPSRIHVTCALVYETTPAGRVHKGVCSTWMKNSKPSEESHDCSWAPIFVRQSNFKLPADPTVPIIMIGPGTGLAPFRGFMQDRLAQKEAGVDLGPAVLFFGCRNRRMDYIYEEELNGFVEAGAISELVVAFSREGPTKEYVQHKMMEKASDIWNMISQGAYLYVCGDAKGMARDVHRTLHTIVQEQGSLDSSKTEMLVKNLQMDGRYLRDVW

SEQ ID NO: 289 - protein, 688 aa, Eschscholzia californica
ASNFVNSIESIFGISLGSSSESTISEPVLIIITTSVAVLIGFGFFLWMKSSSSEKPKEPVKLVPVQKDEDVEVDPDKTKVTIFFGTQTGTAEGFAKTLAEEVKGRYEKAVVKVVDLDDYAADDDQYEDKLKKETLALFMVATYGDGEPTDNAARFFKWFTQEHERGVWLQHLTYGVFGLGNRQYEHFNKIANVVDEQLNEQGAKRIVPVGLGDDDQCIEDDFTAWRELLWTELDQLLRDEDSANTASTPYTAVVPEYRVAIHEPTVKAVLDKQFSMTNGNAAFDIHHPCRANVAVQRELHKPDSDRSCIHLEFDISDTNLTYETGDHVGVYAENCDEIVEEGGKLLGQPMDLLFSLHTDKEDGTPLGSSLPPPFPGPCTLRTALARYADLLNPPRKAALIALAAHASLPSEADRLKFLSSPQGKDEYSKWVVGSQRSLLEVMAEFPSAKPPLGVFFAAIAPRLQPRYYSISSSPKFAPSRIHVTCALVYGPSLTGRVHKGVCSTWMKHAVSMEKSHDCSWAPIFVRTSNFKLPADPSVPIVMVGPGTGLAPFRGYLQERMALKEEGAQLGPAMLFFGCRNRRMDFIYEDELNNYAEQGVVSDLIVAFSREGEKKEYVQHKMMDKAADVWSIISSGGYLYVCGDAKGMARDVHRTLHTIAQEQGSMDSTAAEAAVKKLQMDGRYLRDVW

SEQ ID NO: 290 - protein, 687 aa, Glaucium flavum
ASNFANSIESMFGISLGGSSEYVSEPMLIIITTSVAVLIGLGFFIWMKSTPSKPVEPSKPVSFMKEEDEVEVDPGKTKITIFFGTQTGTAEGFAKALSEEIKARYDKAVVKVVDLDDYAADDDLYEEKLKKENLAFFMLATYGDGEPTDNAARFYKWFTQEHERGAWLQQLTYGVFGLGNRQYEHFNKIANVVDEQLKEQGAKRLVPVGLGDDDQCIEDDFTAWRELLWTELDQLLRDEDGANTASTPYTAAVAEYRVVIHDLTDRALVNKQLSMTNGNVAFDIHHPCRANVAVQRELHKPDSDRSCIHLEFDISGTGLTYETGDHVGVYAENCDETVEEGGKMLGQPMDLLFSLHTDNEDGTPLGSSLPPPFPGPCTLRAALARYADLLNPPKKAALIALAAHASEPSEAERLRFLSSPQGKDEYSKWVVGSQRSLLEVMTEFPSAKPPLGVFFAAVAPRLQPRYYSISSSPRSAPSRIHVTCALVYGPSPTGRIHRGVCSTWMKHAVGLERSQDCSWAPVFVRTSNFKLPTDPSIPIVMVGPGTGLAPFRGFLQERLALKQDGAQLGPAMLFFGCRNRRMDFIYEDELNNFVEQGAISELIVAFSREGEKKEYVQHKMMEKAAELWNVISSGGHLYVCGDAKGMARDVHRTLHTIAQEQGGLDSSGAESTVKKLQMDGRYLRDVW

SEQ ID NO: 291 - protein, 653 aa, Glaucium flavum
FIGCGFLYFWRRSLKKSSKIVEAPKSLIVKQELEPEINDGKKKVTIFFGTQTGTAEGFAKALAEEAKARYDKAIFKVVDLDDYAADDDEFEEKLKKETLALFFLATYGDGEPTDNAARFYKWFSEGKERDIWLQNLQFGVFGLGNRQYEHFNKVAKVVDDILLEQGGKRLVPVGLGDDDQCIEDDFTAWRELLWPELDQLLLDENDATSVSTPYTAAVAEYRVVFHDAADASLQEKDWSNANGHAVHDIQHPCRANVAVRKELHTPASDRSCIHLEFDVSGTGLSYETGDHVGVYSENCVETVEEAERLLGYSPDTFFSIHVDKEDGTPLSGSALAPPFPSPCTLRTALTRYADLLNFPKKAALHALAAYASEPKEADRLRYLASPAGKDEYAQWVVASQRSLLEVMAEFPSAKPPLGVFFASVAPRLQPRYYSISSSHRMAPSRIHVTCALVNETTPAGRIHKGVCSTWMKNSVPSEESRDCSWAPIFVRQSNFKLPADPTVPVIMIGPGTGLAPFRGFMQDRLVQKEAGVELGPAVLFFGCRNRRMDYIYEEELNGFVEAGAISELVVAFSREGPTKEYVQHKMMEKASDIWNMISQGGYLYVCGDAKGMARDVHRTLHTIVQEQGSLDNSKTEMLVKNLQMDGRYLRDVW

SEQ ID NO: 292 - protein, 685 aa, Argemone Mexicana
ASNLANSLESMFGISLGSEYVTDPMLIIITTSAAVLIGLGFFICMKSSSVPPKPVETFKPIDKEEEEVEVDPGKTKLTIFFGTQTGTAEGFAKALAEEIKAKYEKALVKVVDLDDYAAEDDQYEEKLRKERLVFFVVATYGDGEPTDNAARFFKWFTQENERGDWLQQLAYGVFGLGNRQYEHFNKIAKELDEKLNEQGAKRLVPVGLGDDDQCIEDDFTAWRELLWEELDQLLRDQDAAPTVSTPYTATVPEYRVVIHDPTVTTWEDKHLNTVNGNVVFDIHHPCRASVAVQRELHKPESDRSCIHLEFDISGTGLIYETGDHVGVYAENCDETVEEAGKLLGQPLELLFSIHTDKEDGSPQGSSLPPPFPGPCNLRTALARYADLLNPPRKASLIALAAHASVPSEAERLKFLSSPQGKDEYSQWVVGSQRSLLEVMAEFPSAKPPLGVFFAAVAPRLQPRYYSISSSPKFAPSRIHVTCALVLGPSPTGRIHRGVCSTWMKHAVPQEKSLDCSGAPIFVRTSNFKLPADPSIPIVMVGPGTGLAPFRGFLQERMALKENGAQLGPAVLFFGCRNRRMDFIYEDELNNFVEHGALSELIIAFSREGEKKEYVQHKMMEKAADVWNVISGCGYLYVCGDAKGMARDVHRTLHTIAQEQGSMDSSAAEAAVKKLQVEGRYLRDVW

SEQ ID NO: 293 - protein, 663 aa, Argemone Mexicana
  misc_feature (119)..(119): Xaa can be any naturally occurring amino acid
ILMILTTAIAVFIGCCFLYVWRRSLKKSRKIVEVPKSLVVKEPEPEVDDGKKKVTIFFGTQTGTAEGFAKALCEEAKARYEKTIFKVVDLDDYAAEDYEFEEKLKKETIALFFLATYGXGEPTDNAARFYKWLTEGKEKDAWLQNLHFGVFGLGNRQYEHFNKVAKVVDEIFVEQGGKRLVYVGLGDDDQCIEDDFTAWRELVWPELDQLLLDENDSTSVSTPYTAAVAEYRVVFHEIEDASLQDKNWSNANGHTVYDALHPCRANVAVRRELHTPASDRSCIHLEFDISGTSLAYETGDHVGVYSENCIETVEEAERLLGFSSDTFFSIHVDKEDGTPITGSTLPPPFPSPCTLRTALTRYADLLNFPKKAAVHALAAYASDPKEAERLRFLASPAGKDEYAQWVVASQRSLLEVMAEFPSAKPPLGVFFAAIAPRLQPRYYSISSSNRMSPSRIHVTCALVHEKTPAGRIHKGVCSTWMKNSVPREESRDCSWAPVFVRQSNFKLPADSTIPIIMIGPGTGLAPFRGFMQERLALKEAGVKLGSAILFFGCRNRSMDYIYEEELNNFVESGSISELVVAFSREGPTKVYVQHKMMEKASDIWNMISQGGYLYVCGDAKGMAKDVHRTLHTIVQEQGSLDSSKTEMMVKNLQMEGRYLRDVW

SEQ ID NO: 294 - protein, 686 aa, Corydalis cheilanthifolia
SNPANFLESVFGISVGSSSEPILLIITTSVAVLIGIAFFLWIRSSGKESTLKPVEDFNKSSTKKEEEDDVLDPGKTKLTIFFGTQTGTAEGFAKALAEEIKAKYEKAVVKVVDLDDYAAEDDLYEEKLKKETMAFFIVATYGDGEPTDNAARFYKWFTQEHERGPWLPQLTYGVFGLGNRQYEHFNKIAKVVDEQLNEQGAKRLVPVGLGDDDQCIEDDFTAWRESLWTELDQLLRDEDTANTVTTPYTASVPEYRVVIHDPSFTPLEEKHLNMTNGNVAFDIHHPCRANVAVQKELHKPDSDRSCIHMEFDISGTGLTYETGDHVGVFAENYDEIVEEGGKLLGQPMDLLFSVHTDKEDGTPQGSSLPPPFPGPCTVRTALARYADLLTPPRKAALVALAAHASVPSEADRLKFLSSPAGKDEYSQWVVGSQRSLLEVMAEFPSAKPPLGVFFAAVAPRLQPRYYSISSSPKFAPSRIHVTCALVYGPSPTGRIHRGVCSTWMKNAVPLEKSQDCSWAPVFVRTSNFKLPTDPSIPIIMVGPGTGLAPFRGFLQERAALKEDGVELGPAVLFFGCRNRRMDFIYEDELNNFTEQGVVSELIVAFSREGETKEYVQHKMTERATYIWSLISSGAYFYVCGDAKGMARDVHRTLHTIAQEQGGMSSSEAEATVKKLQMDGRYLRDVW

SEQ ID NO: 295 - protein, 668 aa, Corydalis cheilanthifolia
  misc_feature (114)..(114): Xaa can be any naturally occurring amino acid
VLMILTTSLAVFIGCAFIYIWRKSFGPKSSKIVENQKTVIVKEEPEVEVDDGKKKVTIFFGTQTGTAEGFAKSLADEARARYEKAVFKVVDLDDYAGDDDEFEEKLKKESLALXFLATYGDGEPTDNAARFFKWFTEGKERDEPWLKNLQFGVFGLGNRQYEHFNKVAKVVDEIIVELGGKRLVPVGLGDDDQCIEDDFTAWRELVWPELDQLLRDEDDATIAATPYTAAIPEYRVVFHDTAEASLQDKNWSNANGNGNAVHDVLHPCRSNVAVRRELHTPASDRSCTHLEFDISGTGLSYETGDHVGVFCENFIENVEEAERLLGYSSDVSFSIHVDNEDGTPISGSSLPPPFPSPCTLRTALLKYADLITFPKKSALLALASHASDPTEADRLRFLASPAGKDEYAQWVVASQRSLLEVMAEFPSAKPPLGVFFAAIAPRLQPRYYSISSSPRMAPSRIHVTCALVHEKTPAGRIHKGVCSTWMKNAVPLEESRDSSWAPIFVRQSNFKLPADSTLPIIMIGPGTGLAPFRGFMQERLALKESGVKLGPAIFFFGCRNKRMDYIYEEELSGFVHGGAISELVVAFSRDGPAKEYVQHKMIERASDIWNMISQGAYVYVCGDAKGMAKDVHRTLHTIVEEQGSLDSSKTELLVKNLQMEGRYLRDVW

SEQ ID NO: 296 - protein, 697 aa, Thalictrum flavum
ASNIVDSLESALGISLGSESIDPQTILVVLTTSVAVVIGLVFFIWKRSSSQDSSSSKTTDAFKPISFKEEEEDEIEPGKIKVTIFFGTQTGTAEGFAKALAEEVKARYEKAVVKVLDLDDYAADDDQYEEKMKKETLSIFMLATYGDGEPTDNAARFYKWFTEEHERGAWLQHLTYGVFGLGNRQYEHFNKIAKVVDEKLMEQGAKRLVEVGLGDDDQCIEDDFTAWRESLWPELDQVLRDEDDVNTVATPYTAAVPEYRVVIHDPTITSEDKYLSIANGNANGNANGHTVFDIHHPCRANVAVRKELHKPESDRSCIHLEFDISGTGLRYETGDHVGVYAENCDETVEEVGKLLGQPLDLLFSLHTDKEDGTAQGSSLPPPFPGPCTLRAALARYADLLTPPKKAALVALAAHASEPSEADKLKHLSSPEGKNEYSTWIVASQRGLLEVMTEFPSAKPPLGVFFAAVAPRLQPRYYSISSSPRFAPSKIHVTCALVYGPSPTGRIHKGVCSTWMKNAIPLEKSNDCSWAPIFVRSSNFKLPADPSIPIVMVGPGTGLAPFRGFLQERLALKEDGAQLGPAVLFFGCRNRRMDFIYEDELNNFVEQGALSELVIAFSREGEQKEYVQHKMMEKAAQMWSLISSGGYLYVCGDAKGMAKDVHRTLHTIVQEQEKLDSTKAEATVKKLQMDGRYLRDVW

SEQ ID NO: 297 - protein, 602 aa, Thalictrum flavum
TGTAEGFAKALAEEAKARYEKANFKIVDLDDYAQDDDEYEEKLKKENLALFFLATYGDGEPTDNAARFYKWFSEGKEREPWLQHLEFAVFGLGNRQYEHFNKVAKVVDDILAEQGGKRLVPVGLGDDDQCIEDDFTAWRELLWPELDKLLMDEDDATAVSTPYTAAVPEYRVVFHDTSDVSPQDKNWGNANGHTTADAQHPRRAIVAVRRELHTPASDRSCTHLEFDISGTGVMYETGDHVGIYSENGVEIVEEAEMLLGYSPNTFFSIHTDNEDGTPRGGSTMAPPFPSPCTLRSALTLYADLLNFPKKAALMALAAHASNPSEADRLRFLASPAGKDEYAQWVVASQRSLLEVMAEFPSAKPPLGVFFAAVAPRLQPRYYSISSSPRIAPTRIHVTSALVYEKTPTGRIHKGVCSTWIKNSVPSDERSDCTSAPIFVRQSNFRLPTKTTLPIIMIGPGTGLAPFRGFLQERLALKRAGTELGPAILFFGCRNRNMDYIYEDELNSFVEAGALTELVVAFSREGPNKQYVQHKMTERASDIWNMISQGGYLYVCGDAKGMAKDVHRTLHTIAQEQGSLDNSKTELMIKNLQMDGRYLRDVW

SEQ ID NO: 298 - protein, 664 aa, Hydrastis canadensis
VLMILTTSIAVLIGCVILFLWKRSSGQKSSKRLEPPKPLIFKEPEPEVDDGKKKVTIFFGTQTGTAEGFAKALAEEAKARYEKAIFKVVDLDDYAADDDKYEEKMSKETVALFFMATYGDGEPTDNAATFYKWFTEGKERGIWLQNLQYGVFGLGNRQYEHFNKVAKVVDEILAEQGGKRLVSVGLGDDDQCIEDDFTAWRELVWPELDKLLLDEDAATSVSTPYTAAVPEYRIVFHDPSDASLQGKNRSNANGHTIPDIQHPFRVNVAVKRELHTPASDRSCTHLEFDISNTGLTYETGDHVGVYSENSIEYVEEAERLLGYSADTFFSIHVEDEDGTPLGGSSLAPPFPSPCTLRTALTRYADLLNSPKKAALMALAAHASDPTEADRLRFLASPAGKDEYAQWVVASHRSLLEIMAEFPSAKPPLGVFFAAIAPRLQPRFYSISSSPRIAPTRIHVTSAIVYEKTPSGRIHKGVCSTWMKNSVPLEESPDCSSAPIFVRQSNFKLPTNTSLPIIMIGPGTGLAPFRGFLQERLALKEAGTELGHAILFFGCRNRKMDYIYEDELNGFVKGGALTELVVAFSREGPTKEYVQHKMMERASDIWNMISQGGYIYVCGDAKGMAKDVHRTLHTIVHEKGSLDNSKTEMMVKNLQMDGRYLRDVW

SEQ ID NO: 299 - protein, 694 aa, Nigella sativa
ASNLVNSLESALGISLGSESTDPQTILVVLTTSVAVVIGLVVFFWKRSSQDRSSKPIQSLKPISFKAEEEDEIEPGKTKVTIFFGTQTGTAEGFAKALSEEIKARYEKAAVKVVDLDDYAAEDDQYEEKLKKETLSFFMLATYGDGEPTDNAARFYKWFTQEHERGAWLQHMSYAVFGLGNRQYEHFNKIAKVVDEQLIEQGAKRLAEVGLGDDDQCIEDDFTAWRESLWPELDQLLRDEDDINTVTTPYTAAVPEYRVMIHDPTVTSWEDKYLSMSNGNGYANGHSAFDIHHPCRANVAVTKELHKPDSDRSCIHLEFDISGTGLIYETGDHVGVYAENCDETVEEAGKLLGQSLDLLFSLHTDKEDGTPQGSSLPPPFPGPCTLRVALARYADLLNPPKKAALTALAAHASEPSEADKLKYLSSPEGKDEYSKWIVGSQRGLLEVMAEFPSAKPPVGVFFAAIAPRLQPRYYSISSSPRFSPFRIHVTCALVYGPSPTGRIHKGVCSTWMKNAVPLEKNHDSSWAPIFVRTSNFKLPADPSIPIVMVGPGTGLAPFRGFLQERMALKEDGVQLGPAVLFFGCRNRRMDFIYEDELNSFVERGALSELVIAFSREGQQKEYVQHKMMEKAAYIWSLISNGGYLYVCGDAKGMARDVHRTLHTIVQEQDHVDSTKAESSVKKLQMDGRYLRDVW

SEQ ID NO: 300 - protein, 689 aa, Xanthorhiza simplicissima
SKNLVNTIESVLGISLGGESSDPEKILIIFTTSLAVIIGLGFYLWRKTFDSEKNKKSVESLKPVTFKEEEEEVEIEPGKVKVTIFFGTQTGTAEGFAKALAEEIKARYEKAVVKVIDLDDYAADDDIYEEKLKKETLAFFMVATPTDNAARFHKWFTQEHERGAWLQQLTYGVFGLGNRQYEHFNKIAKDLDEQLIEQGAKRLVQVGMGDDDQCIEDDFTAWRESLWPELDQILRDEDDVNTIATPYTATVPEYRVIYHDPTVTASDEKYLSMANGNANGNAVFDIHHPCRANVAFQKELHKPDSDRSCIHLEFDISGTGLTYETGDHVGVYAENCEETVEEAAKLLGQSLAILFSLHTDKVDGTSQGSSLPPPFPGPCTLRVALARYTDLLSPPKKAALLALAAHASEPGEADKLKLLASPEGKEEYSKWIVGSQRGLLEVMAEFPSAKPPLGVFFAAVAPRLQPRYYSISSSPRFAPSRIHVTCALVYGPSPTGRIHKGVCSTWMKNAAPLEKSEDCSWAPVFVRTSNFKLPADPSIPIVMVGPGTGLAPFRGFLQERLALKEDGVQLGPAVLFFGCRNRKMDFIYEDELNNFVEQGVISELVVAFSREGEKKEYVQHKMMEKAAYMWSLISGGGYLYVCGDAKGMARDVHRMLHTIVQEQEHVESSKAEATVKKLQMDGRYLRDVW

SEQ ID NO: 301 - protein, 679 aa, Xanthorhiza simplicissima
IDISQVFENRQVLMLLTTSFAVLIGCVFVFIWRRSSSSSSGNKSSKSIEPLKPIIFKETEPEIDDGKKKVAILFGTQTGTAEGFAKAFSEEAKARYEKVTFKVVDLDEYAADDDEYEAKLKKETVALFFVATYGDGEPTDNAARFYKWFEEGKERGVWLKNLQFGVFGLGNRQYEHFNKIAKVVDEILVEQGGKRLVPVGLGDDDQCIEDDFTAWRELVWPEFDKLLLDEDDTTSVSTPYTAAVLEYRVVFHDISDAAAQDKNWSKANGHTTPDIQHPCSANVVVRRELHTPASDRSCTHLEFDISGTGLGYETGDHVGVYAENSIEYVEEAERVLGYSPDTFFSIHVDNEDGSPRGGSSLAPPFPSPCTLRTALTRYADLLNSPKKAALLALAAHASDPTEADRLRNLASPAGKDEYAQWVVASQRSLLEVMAEFPSAKPPLGVFFAAIAPRLQPRYYSISSSSRMAPTRIHITSALVYEKTPIGRVHKGVCSTWIKNSVPLEESPNCSSAPIFVRQSNFKLPTNTSLPVIMIGPGTGLAPFRGFLQERLALKEAGAELGPAILFFGCRNRNMDYIYEDELNGFVEAGALTELVVAFSREGPKKEYVQHKMMERAADLWNMISQGGYLYVCGDAKGMAKDVHRSLHTIVQEQGSLDNSKTESMVKNLQMDGRYLRDVW

SEQ ID NO: 302 - protein, 664 aa, Berberis thunbergii
LLMILTTSIAVLIGCVFVFVWRRSSGSKSSKVEPPKPLIVKDLEPEVDDGKKKVSIFFGTQTGTAEGFAKALADEAKARYDKVTFKVVDLDDYAADDDEYEEKLKKESLAIFFLATYGDGEPTDNCARFYKWFTEEGKEKGAWLQNLQYGVFGLGNRQYEHFNKIAKVVDEQLAEEGAKRLVPVGIGDDDQCIEDDFTAWRELVWPELDQLLRDEDDATSVTTPYTAAVLEYRVVFYDPEDALVQEKNQSNANGHTVHDVNHPCRANVAVKRELHTPASDRSCIHLEFDISGTGLTYETGDHVGVFCENHIENVEEAERLLGFAPETYFSIHSEKEDGTPVGGTSLPPPFPSPCTLRKALTQYADLLNSPKKAALLALAAHASDSSEADRLRFLASPAGKDEYSQWVVASQRSLLEVMAEFPSAKPPIGVFFAAVAPRLQPRYYSISSSPRMASTRIHVTCALVYEKTPTGRIHKGVCSTWMKNAVSLEESRDCSWAPVFVRQSNFKLPADTTTPVVMIGPGTGLAPFRGFLQERFALKEAGAELGPAILFFGCRNRQMDFIYEDELNGFVESGAISELVLAFSREGPNKQYVQHKMMERASDVWNMISQGGYLYVCGDAKGMARDVHRTLHTIAQEQGSMDSTKAESVVKHLQMEGRYLRDVW

SEQ ID NO: 303 - protein, 618 aa, Mahonia aquifolium
VDDGKKKVSIFFGTQTGTAEGFAKALADEAKARYDKVTFKVIDLDDYAADDDEYEEKLKKESVAIFFLATYGDGEPTDNCARFYKWFTEEGKQKGAWLQNLQYGVFGLGNRQYEHFNKIAKVVDEQFAEQGAKRLVPVGIGDDDQCIEDDFTAWRELVWPELDQFLCDEDDKTSVTTPYTAAVLEYRVVFYDPEDALEQEKNQSNANGHAVHDVNHPCRANVAVKKELHTPASDRSCIHLEFDIFGTGLSYETGDHVGVFCENHIENVEQAERLLGFAPETYFSIHSEKEDGTPVGGTSLPPPFPSPCTLRKALTRYADLLNSPKKAALLALAAHASDSGEADRLRFLASPAGKDEYSQWVVASQRSLLEVMAEFPSAKPPLGVFFAAVAPRLQPRYYSISSSPRMAPTRIHVTCALVYEKTPTGRIHKGVCSTWMKNAVPLEESRDCSWAPVFVRQSNFKLPADTTTPVVMIGPGTGLAPFRGFLQERFALKEAGAELGPAILFFGCRNRQMDFIYEDELNSFVKSGAISELVVAFSREGPNKQYVQHKMMERASDVWNMISQGGYLYVCGDAKGMARDVHRTLHTIAQEQGSMDSSKAESMVKNLQMEGRYLRDVW

SEQ ID NO: 304 - protein, 557 aa, Mahonia aquifolium
LLMILTTSIAVLIGCVFVFVWRRSSGSKSSKVEPLKPLIVKNLEPEVDDGKKKVSIFFGTQTGTAEGFAKALADEAKARYDKVTFKVVDLDDYAGDDDEYEEKLKKESLAIFFLATYGDGEPTDNCARFYKWFTEEGKEKGAWLQNLQYGVFGLGNRQYEHFNKIAKVVDEQLAEQGAKRLVPVGIGDDDQCIEDDFTAWRELVWPELDQLLRDEDDATSVTTPYTAAVLEYRVVFYDPEDALVQEKNQSNANGHAVHDVNHPCRANVAVKRELHTPASDRSCIHLEFDISGTGLTYETGDHVGVFCENHFENVEEAERLLGFAPETYFSIHSEKEDGTPVGGTSLPPPFPSPCTLRKALTRYADLLNSPKKAALLALAAHASDSSEADRLRFLASPAGKDEYSQWVVASQRSLLEVMAEFPSAKPPLGVFFAAVAPRLQPRYYSISSSPRMASTRIHVTCALVYEKTPTGRIHKGVCSTWMKNAVPLEESRDCSWAPVFVRQSNFKLPADTTTPVVMIGPGTGLAPFRGFLQERFALKEAGAELGPAILFFGCRNR

SEQ ID NO: 305 - protein, 665 aa, Jeffersonia diphylla
VLMILTTSIAVLIGCVFVFVWRRSSGQKSSKSIEPLKPLVVKDLEPEVDDGKKKVSIFFGTQTGTAEGFAKALSDEAKARYDKAKFRVIDLDDYAADDAEYEEKFKKETVAFFFLATYGDGEPTDNCARFYKWFTEEGKDKGEWLQNLQFGVFGLGNRQYEHFNKIAKVVDEQLVEHGAKRLVPVGIGDDDQCIEDDFTAWRELVWPELDQILRGEDDATSVSTPYTAAVPEYRVVFYDPEDAALQDKNWSAANGHTAHDINHPCRANVAVRRELHTPASDRSCTHLEFDISGTALTYETGDHVGVFCGNHIEDVEAAESLLGHAPETFFSIHSENEDGTPLGGTSLPPPFPSPCSLRTALTQYADLLNSPKKAALLALAAHASDPSEAERLRFLASPAGKDEYSQWIVASQRSLLEVMAEFPSAKPPLGVFFAAIAPRLQPRYYSISSSPRMAPSRIHVTCALVYEKTPGGRIHKGVCSTWMKNAVPLEESRDCSWAPIFVRLSNFRLPADTSTPIVMIGPGTGLAPFRGFLQERLALKEAGAELGPAILFFGCRNRQMDYIYQDELNGFVESGAISELVVAFSREGPKKEYVQHKMMERASDVWNMISQGGYLYVCGDAKGMAKDVHRTLHTIAQEQGSLDSTKAESMVKNLQMDGRYLRDVW

SEQ ID NO: 306 - protein, 686 aa, Nandina domestica; identical to SEQ ID NO: 294

SEQ ID NO: 307 - protein, 665 aa, Nandina domestica
VLMILTTSIAVLIGCVVLFVWRRSSGSKSSKSVETIRPLVPKEPEPEADDGKKKVSIFFGTQTGTAEGFAKALADEAKARYDKVAFKVIDLDDYAADDAEYEEKFKKESVAIFFLATYGDGEPTDNCARFYKWFTEEGKEKGAWLQNLQFGVFGLGNRQYEHFNKIAKVVDEQLAEQGAKRLVPVGIGDDDQCIEDDFTAWRELVWPELDQLLRDEDDTTTVSTPYTAAVLEYRVVFYDPEDALQQVKNWSNANGHAVHDINHPCRANVAVKRELHTPASDRSCTHLEFDISHTGLTYETGDHVGVFCENLIEDVEEAERILGLAPDTFFSIHTENEDGTPVGKTSLPPPFPSPCTLRAALTRYADFLNSPKKAALLALAAHASDPSEADRLRFLASPAGKEEYAQWIVASQRSLLEVMAAFPSVKPPLGVFFAAIAPRLQPRYYSISSSPRMAPSRIHVTCALVYEKTPTGRIHKGVCSTWMKNAVPLEESRDCSWAPIFVRQSNFKLPMDTTTPVIMIGPGTGLAPFRGFLQERLALKQAGAELGPAILFFGCRNRRTDFIYEDELNGFVESGALSELIVAFSREGPNKEYVQHKMMSRASDVWNMISQGGYLYVCGDAKGMAKDVHRTLHTIAQEQGSLDSTKAEAMVKNLQTDGRYLRDVW

SEQ ID NO: 308 - protein, 688 aa, Menispermum canadense
ASNSANLVESVLGISLGSEPIPETILVIFTTSVAVLIGFILFLWRRSSARERPVKPVEALKPVSLIEEDEVEVDPGKTKVTILFGTQTGTAEGFAKALAEEIKARYDKAVVKVIDLDEYAVDEDQYEEKMKKETLAFFMLATYGDGEPTDNAARFYKWFTQEHERGTWLQQLTYGVFGLGNRQYEHFNKVAKVVDEQLIEQGAKRLVQVGLGDDDQCIEDDFTAWREVLWPELDKILRDEDDVNTAATPYTAIIPEYRVVIHNPSVEVYEDKYSNTANGNVAFDIHHPCRSNVAVRRELHKPDSDRSCIHLEFDISSTGLIYETGDHVGVYAENSKETVEEAGKLLSQPLDLLFSLHIDKEDGTPLGSSLPPTFPGPCTLGCALAHFADLLNPPKKAALVALAAHASEPGDAERLKFLSSPEGKDEYSQWVVASQRSLLEVMAEFPSAKPPLGVFFAAVAPRLQPRYYSISSSPRFAPSRIHVTCALVYGPSPTGRIHKGVCSTWMKHAVPLEESNDCSWAPIFVRTSNFKLPADPLIPIVMVGPGTGLAPFRGFLQERLALKEEGAQLGPAVLFFGCRNRKMDFIYGDELNNFVEQGVLSELIVAFSREGPAKEYVQHKMMEKAAHMWSLISSGGYLYVCGDAKGMARDVHRTLHTIVGEQECTDSSKAEATVKKLQMDGRYLRDVW

SEQ ID NO: 309 - protein, 664 aa, Menispermum canadense
VLMMLTTLIAVLIGCVFLFVWRRSSGQKSSKSVEPLKPLIVKDLEPEVDDGKKKVTIFFGTQTGTAEGFAKALAEEAKARYEKATFKVIDLDDYGADEDECEEKLKKETIVFFFLATYGDGEPTDNAARFYKWFTDGKDKENWLDNLQFGVFGLGNRQYEHFNKVAKVVDEILAAQGGKRLVPVGLGDDDQCIEDDFTAWRELVWPELDQLLLDEDYATSVPTPYTAAVPEYRVVFHDHANGLVGNMNLSSANGHTVHDIQHPCRANVAMRKELHTPASDRSCIHLEFDISGTGLVYETGDHVGVYCDNSIENVEEAERLLGYSPDTFFSIHTDNEDGTPLSGSSLPPPFPSPCTLRTALTRYADLLNFPKKAALLALAAHASDSSEADRLRFLASAAGKDEYAQWVVASQRSLLEVMAAFPSAKPPLGVFFGAITPRLQPRYYSISSSPRIASSRIHVTCALVYEKTPTGRIHKGVCSTWMKNAVPLDESSDCSWAPIFVRQSNFKLPADTCLPVIMIGPGTGLAPFRGFLQERLALKEAGANLGPAILFFGCRNRRMDYIYEDELNGFVKAGALSELVVAFSREGPTKEYVQHKMMERASDIWTMISQGGYLYVCGDAKGMAKDVHRTLHTIVQEQGSLDSSKTESMVKNLQMDGRYLRDVW

SEQ ID NO: 310 - protein, 610 aa, Cissampelos mucronata
ANLVESVLGISLGTERIPDSVLVVFTTGLAVLVGLVLFLWRRSSNSRERPAKPVESLKPVSLIEEDEEEVDPGKIKVTILFGTQTGTAEGFAKALAEEIKARYEKAVVKVIDLDDYAVDDDLYEEKLKREKLAFFMLATYGDGEPTDNAARFYKWFTQEHERGVWLQQLTYGVFGLGNRQYEHFNKVAKVVDEGLIEQGAKRLIQVGLGDDDQCIEDDFTAWRELLWPELDKILRDEDDANTAATPYTATILEYRVVIHDHSSGLHEHKLLSMANGNSASDIHHPCRSNVAVRRELHKPESDRSCIHLEFDISGTGLRYETGDHVGVYAENSKETVEEAGKLLGQPLNLVFSLHNDKEDGSPLGSALPPAFPGPCTLGSALSQYADLLTPPKKAALIALAAHASEPGDADRLKFLSSPEGKEEYSHWVVGCQRSLLEVMAEFPSAKPPLGVFFAAVAPRLQPRYYSISSSPRFAPSRIHVTCALVYGPSPTGRIHKGVCSTWMKHAISLEESHDCSWAPIFVRTSNFKLPADPSVPVVMVGPGTGLAPFRGFLQERLALKEEGVQLGPAVLFFGCRNRRMDFIYEDELSNFVEGVISNLIVAFSREGPTK

SEQ ID NO: 311 - protein, 664 aa, Cissampelos mucronata
VLMLLTTSIAVLIGCVFIFVWRRSSGQKSSKSVEPPRPLIVKEVEPEVDDGKKKVTILFGTQTGTAEGFAKALAEEAKVRYEKATFKVIDLDDYGVDDDEYEEKLKKESIVFFFLATYGDGEPTDNAARFYKWFTEVKEKEMGLSNLQFGVFGLGNRQYEHFNKVAKVVDEILVAQGGKRLLPVGLGDDDQCIEDDFTAWRELLWPELDLLLRDEDDATSVATPYTAAVPEYRVVFHEPANGLVDSKNVISANGHAVHDIQHPCRANVAVRRELHTPASDRSCIHLEFDISGTGLAYETGDHVGVYCENIIENVEAAERLLGYSPDTFFSLHTDKEDGTPLGGSSLPPPFPAPCTLRTALTKYADLLYFPKKAALLALAAHASDPSEADRLKFLASPAGKDEYAQWVVASQRSLLEVMAAFPSVKPPLGVFFAAIAPRLQPRYYSISSSPRIAPSRIHVTCALVYEKTPTGRIHKGVCSTWMKYAVPLIESSNCSWAPIYVRQSNFKLPVDTSLPVIMIGPGTGLAPFRGFLQERLALIEAGAHLGPAILFFGCRNRRMDYIYEDELDGFVKAGALSELVVAFSREGPTKEYVQHKMMEKASDIWNMISQGAYVYVCGDAKGMAKDVHRMLHTIVQEQGSLDSSKTESFVKNLQMDGRYLRDVW

SEQ ID NO: 312 - protein, 680 aa, Cissampelos mucronata
FESIVAMWIGQEAVPDWAVLIFKASVGVLVGIGYVFWSRFSARRETSLERALKASLSKEDEDDELKTKITILFGTQTGTADGFAKALAAEIESRYERAVVKVIDLDKYAMDDNEYEKKLGKETLVFFLVASYGDGEPTDNAVRFHKFLTEGQHRGVWLQQLTYGVFGLGNRQYEQFNKMGRVVDEQLSEQGAKQLIPLGTGDDDKCIEDDFSAWRETLWPALDQLLLSKDAAYTASTSFIVAIPEYRVVTHDVGATYSNGNLLNATDGNSSSIFGVHHPCRAKVAVRRELHKPGSDRSCIHLEFDISGTNLKYETGDHIGVYAENSDETVEKAGNLLDQSLELLFSLHADREDGTKIGSALAPAFPGPCTLRTALARYADLLNPPRKTALAALAAFASEPHEEQRLKFLSSPEGKDEYSRWILESRRSLLEVMAEFPSAKPPLGVFFAAIAPRLQPRYYSISSSPRFSPSRIQVTCAVVYGPSPTGRIHRGVCSTWMKKSVPLGENCNCSWAPIFVRSSNFKLPSDPLVPIIMVGPGTGLAPFRGFLQERLYMKEDGVQLGRALLYFGCRDRTKDFIYEDELKSFVEQGVLTELIVAFSREGPKKEYVQHKMMQKVAYIWSLLSECSGYLYICGDAKGMARDVHQALLGIIQEQECLDSTKAEAALKKLQMEGRYLRDVW

SEQ ID NO: 313 - protein, 688 aa, Tinospora cordifolia
ASNSGNLVESVLGISLGPEPIPERILVIFTTSLAVLIGFLLFLWRRSSSRDKSSKPVEALKPVSFVEEDEVEVDPGKTKVTILFGTQTGTAEGFAKALAEEIKARYDKAVVKVVDLDDYATDDDVYEEKLKKEVLAFFILATYGDGEPTDNAARFYKWFTQEHERGTWLQQMTYGVFGLGNRQYEHFNKVAKVVDEELNIQGAKHLVQMGLGDDDQCIEDDFTAWRELLWPELDKLLRNEDDANSITTPYTAAIPEYRVVIHDPATAAYEDKYSNIANGNVAFDIHHPCRSNVAVRRELHKPDSDRSCIHLEFDISGTGLVYETGDHVGVYAENCRETVEEAVRLLSQPFDLLFSLHTDKEDGTPLGSSLPPAFPGPCTLGSALAHYADLLNPPKKAALVALSAHASEPADAERLKFLSSPEGKDEYSQWVVASQRSLLEVMAEFPSAKPPLGVFFAAIAPHLQPRYYSISSSPKFVPSRIHVTCALVYGPSPTGRIHKGVCSTWMKHAVSLEESHDCSWAPIFVRASNFKLPRDPLIPIVMVGPGTGLAPFRGFLQERLALKEEGVQLGPAVLFFGCRNRKMDFIYEDELNNFTEQGVLSELIVAFSREGPTKEYVQHKMIDKAAHIWSLITSGGYLYVCGDAKGMARDVHRTLHTIVQEQERVDSTKGEATVKKLQMEGRYLRDVW

SEQ ID NO: 314 - protein, 689 aa, Tinospora cordifolia
  misc_feature (490)..(490): Xaa can be any naturally occurring amino acid
MASNSGNLVESVLGISLGPEPIPERILVIFTTSLAVLIGFLLFLWRRSSSRDKSSKPVEALKPVSFVEEDEVEVDPGKTKVTILFGTQTGTAEGFAKALAEEIKARYDKAVVKVVDLDDYATDDDVYEEKLKKEVLAFFLLATYGDGEPTDNAARFYKWFTQEHERGTWLQQMTYGGSLVLGNRQYEHFNKVAKVVDEELNIQGAKHLVQMGLGDDDQCIEDDFTAWRELLWPELDKLLRNEDDANSITTPYTAAIPEYRVVIHDPATAAYEDKYSNIANGNVAFDIHHPCRSNVAVRRELHKPDSDRSCIHLEFDISGTGLVYETGDHVGVYAENCRETVEEAVRLLSQPFDLLFSLHTDKEDGTPLGSSLPPAFPGPCTLGSALAHYADLLNPPKKAALVALSAHASEPADAERLKFLSSPEGKDEYSQWVVASQRSLLEVWLNPSAKPPLGVFFAAIAPHLQPRYYSISSSPKFVPSRIHVTCALVXGPSPTGRIHKGVCSTWMKHAVSLEESHDCSWAPIFVRASNFKLPRDPLIPIVMVGPGTGLAPFRGFLQERLALKEEGVQLGPAVLFFGCRNRKMDFIYEDELNNFTEQGVLSELIVAFSREGPTKEYVQHKMIDKAAHIWSLITSGGYLYVCGDAKGMARDVHRTLHTIVQEQERVDSTKAEATVKKLQMEGRYLRDVW

SEQ ID NO: 315 - protein, 664 aa, Tinospora cordifolia
VLMMLTTSIAVLIGCVFIFVWRRSSGQKTTKSVEPPKPLIVKDVEPDVDDGKKKVTILFGTQTGTAEGFAKALAEEAKARYDKATFKVIDLDDYGADDDDYEEKLKKETIVFFFLATYGDGEPTDNAARFYKWFTEGKERGIWLDKVQFGVFGLGNRQYEHFNKVAKVVDEILADQGGKRLVPVGLGDDDQCIEDDFTAWRELVWPELDQLLQDEDGIAHVSTPYTAVVPEYRVVFHEISNGQVYNKDLSSANGHAVHDIQHPCRANVAVRRELHTPASDRSCTHLEFDISGTGLVYETGDHVGVYCENCIEVVEEAERLLGYSADTFFSIHADNEDGTPLSGSSLPPPFPSPCTLRMALTRYADLLNFPKKAALLALAAHASDSSEADRLKFLASPAGKDEYAQWVVASQRSLLEVMAEFPSVKPPLGVFFAAIAPRLQPRYYSISSSPRMAPSRIHVTCALVYEKTPAGRIHKGVCSTWMKNAVSLEESTDCSWAPIYVRQSNFKLPADTSVPVIMIGPGTGLAPFRGFLQERLALKEAGANLGPAILFFGCRNRRMDYIYEDELNGFVKAGALTELIVAFSREGPTKEYVQHKMTERASDIWSMISKGAYLYVCGDAKGMAKDVHRTLHTIVQEQGSLDSSKAESMVKSLQMDGRYLRDVW

SEQ ID NO: 316 - protein, 710 aa, Artificial Sequence
  Synthetic sequence
  misc_feature (1)..(138): Xaa can be any naturally occurring amino acid
  misc_feature (140)..(142): Xaa can be any naturally occurring amino acid
  misc_feature (144)..(150): Xaa can be any naturally occurring amino acid
  misc_feature (152)..(157): Xaa can be any naturally occurring amino acid
  misc_feature (162)..(164): Xaa can be any naturally occurring amino acid
  misc_feature (166)..(166): Xaa can be any naturally occurring amino acid
  misc_feature (168)..(179): Xaa can be any naturally occurring amino acid
  misc_feature (181)..(190): Xaa can be any naturally occurring amino acid
  misc_feature (198)..(198): Xaa can be any naturally occurring amino acid
  misc_feature (202)..(206): Xaa can be any naturally occurring amino acid
  misc_feature (208)..(213): Xaa can be any naturally occurring amino acid
  misc_feature (215)..(215): Xaa can be any naturally occurring amino acid
  misc_feature (217)..(221): Xaa can be any naturally occurring amino acid
  misc_feature (223)..(223): Xaa can be any naturally occurring amino acid
  misc_feature (228)..(228): Xaa can be any naturally occurring amino acid
  misc_feature (235)..(235): Xaa can be any naturally occurring amino acid
  misc_feature (240)..(241): Xaa can be any naturally occurring amino acid
  misc_feature (243)..(245): Xaa can be any naturally occurring amino acid
  misc_feature (247)..(248): Xaa can be any naturally occurring amino acid
  misc_feature (250)..(259): Xaa can be any naturally occurring amino acid
  misc_feature (261)..(267): Xaa can be any naturally occurring amino acid
  misc_feature (271)..(306): Xaa can be any naturally occurring amino acid
  misc_feature (309)..(312): Xaa can be any naturally occurring amino acid
  misc_feature (314)..(317): Xaa can be any naturally occurring amino acid
  misc_feature (321)..(321): Xaa can be any naturally occurring amino acid
  misc_feature (323)..(323): Xaa can be any naturally occurring amino acid
  misc_feature (329)..(329): Xaa can be any naturally occurring amino acid
  misc_feature (331)..(331): Xaa can be any naturally occurring amino acid
  misc_feature (335)..(341): Xaa can be any naturally occurring amino acid
  misc_feature (348)..(348): Xaa can be any naturally occurring amino acid
  misc_feature (350)..(353): Xaa can be any naturally occurring amino acid
  misc_feature (355)..(356): Xaa can be any naturally occurring amino acid
  misc_feature (358)..(358): Xaa can be any naturally occurring amino acid
  misc_feature (361)..(365): Xaa can be any naturally occurring amino acid
  misc_feature (367)..(373): Xaa can be any naturally occurring amino acid
  misc_feature (376)..(376): Xaa can be any naturally occurring amino acid
  misc_feature (378)..(381): Xaa can be any naturally occurring amino acid
  misc_feature (384)..(392): Xaa can be any naturally occurring amino acid
  misc_feature (394)..(394): Xaa can be any naturally occurring amino acid
  misc_feature (397)..(397): Xaa can be any naturally occurring amino acid
  misc_feature (399)..(403): Xaa can be any naturally occurring amino acid
  misc_feature (406)..(409): Xaa can be any naturally occurring amino acid
  misc_feature (411)..(414): Xaa can be any naturally occurring amino acid
  misc_feature (416)..(416): Xaa can be any naturally occurring amino acid
  misc_feature (418)..(421): Xaa can be any naturally occurring amino acid
  misc_feature (424)..(426): Xaa can be any naturally occurring amino acid
  misc_feature (429)..(435): Xaa can be any naturally occurring amino acid
  misc_feature (437)..(438): Xaa can be any naturally occurring amino acid
  misc_feature (440)..(440): Xaa can be any naturally occurring amino acid
  misc_feature (442)..(443): Xaa can be any naturally occurring amino acid
  misc_feature (446)..(446): Xaa can be any naturally occurring amino acid
  misc_feature (449)..(450): Xaa can be any naturally occurring amino acid
  misc_feature (452)..(456): Xaa can be any naturally occurring amino acid
  misc_feature (458)..(458): Xaa can be any naturally occurring amino acid
  misc_feature (462)..(466): Xaa can be any naturally occurring amino acid
  misc_feature (469)..(469): Xaa can be any naturally occurring amino acid
  misc_feature (473)..(473): Xaa can be any naturally occurring amino acid
  misc_feature (478)..(481): Xaa can be any naturally occurring amino acid
  misc_feature (483)..(483): Xaa can be any naturally occurring amino acid
  misc_feature (485)..(485): Xaa can be any naturally occurring amino acid
  misc_feature (488)..(488): Xaa can be any naturally occurring amino acid
  misc_feature (495)..(501): Xaa can be any naturally occurring amino acid
  misc_feature (503)..(504): Xaa can be any naturally occurring amino acid
  misc_feature (506)..(506): Xaa can be any naturally occurring amino acid
  misc_feature (508)..(508): Xaa can be any naturally occurring amino acid
  misc_feature (510)..(515): Xaa can be any naturally occurring amino acid
  misc_feature (518)..(518): Xaa can be any naturally occurring amino acid
  misc_feature (520)..(520): Xaa can be any naturally occurring amino acid
  misc_feature (527)..(527): Xaa can be any naturally occurring amino acid
  misc_feature (529)..(541): Xaa can be any naturally occurring amino acid
  misc_feature (544)..(545): Xaa can be any naturally occurring amino acid
  misc_feature (548)..(548): Xaa can be any naturally occurring amino acid
  misc_feature (552)..(552): Xaa can be any naturally occurring amino acid
  misc_feature (555)..(559): Xaa can be any naturally occurring amino acid
  misc_feature (561)..(562): Xaa can be any naturally occurring amino acid
  misc_feature (564)..(564): Xaa can be any naturally occurring amino acid
  misc_feature (576)..(577): Xaa can be any naturally occurring amino acid
  misc_feature (579)..(579): Xaa can be any naturally occurring amino acid
  misc_feature (581)..(586): Xaa can be any naturally occurring amino acid
  misc_feature (588)..(589): Xaa can be any naturally occurring amino acid
  misc_feature (592)..(592): Xaa can be any naturally occurring amino acid
  misc_feature (594)..(596): Xaa can be any naturally occurring amino acid
  misc_feature (601)..(710): Xaa can be any naturally occurring amino acid
XXXXXXXXXXXXXXXXXXXXXXXXXXXXXXXXXXXXXXXXXXXXXXXXXXXXXXXXXXXXXXXXXXXXXXXXXXXXXXXXXXXXXXXXXXXXXXXXXXXXXXXXXXXXXXXXXXXXXXXXXXXXXXXXXXXXXXXXXXKXXXEXXXXXXXAXXXXXXPTDNXXXFXKXXXXXXXXXXXXLXXXXXXXXXXLGNRQYEXFNKXXXXXDXXXXXXGXKXXXXXGXGDDDXCIEDDFXAWREXXWXXXDXXLXXXXXXXXXXTXXXXXXXEYRXXXXXXXXXXXXXXXXXXXXXXXXXXXXXXXXXXXXHPXXXXVXXXXELHXPXSDRSCXHXEFDXXXXXXXYETGDHXGXXXXNXXEXVEXXXXXLXXXXXXXFSXHXXXXDGXXXXXXXXXPXFPXPXXXXXALXXXXDXXXXPXKXXXXALXXXASXXXXXXXLXXLXSXXGKXEYXXWXXXXXRXLLEXXXXXPSXKPPXGVFFXXXXPXLXPRXYSISSSXXXXXXXIXXTXAXVXXXXXXGRXHXGVCSTWXKXXXXXXXXXXXXXAPXXVRXSNFXLPXXXXXPXXMXGPGTGLAPFRGXXQXRXXXXXXGXXLGXAXXXFGCRXXXXXXXXXXXXXXXXXXXXXXXXXXXXXXXXXXXXXXXXXXXXXXXXXXXXXXXXXXXXXXXXXXXXXXXXXXXXXXXXXXXXXXXXXXXXXXXXXXXXXXXXXXXXXX

SEQ ID NO: 317 - protein, 135 aa, Papaver somniferum; identical to SEQ ID NO: 68

SEQ ID NO: 318 - protein, 136 aa, Artemisia annua; identical to SEQ ID NO: 70

SEQ ID NO: 319 - protein, 137 aa, Artificial Sequence
  Synthetic sequence
  misc_feature (1)..(4): Xaa can be any naturally occurring amino acid
  misc_feature (6)..(8): Xaa can be any naturally occurring amino acid
  misc_feature (10)..(14): Xaa can be any naturally occurring amino acid
  misc_feature (16)..(16): Xaa can be any naturally occurring amino acid
  misc_feature (19)..(20): Xaa can be any naturally occurring amino acid
  misc_feature (28)..(28): Xaa can be any naturally occurring amino acid
  misc_feature (36)..(36): Xaa can be any naturally occurring amino acid
  misc_feature (50)..(50): Xaa can be any naturally occurring amino acid
  misc_feature (67)..(68): Xaa can be any naturally occurring amino acid
  misc_feature (71)..(71): Xaa can be any naturally occurring amino acid
  misc_feature (74)..(75): Xaa can be any naturally occurring amino acid
  misc_feature (77)..(78): Xaa can be any naturally occurring amino acid
  misc_feature (83)..(84): Xaa can be any naturally occurring amino acid
  misc_feature (88)..(88): Xaa can be any naturally occurring amino acid
  misc_feature (90)..(91): Xaa can be any naturally occurring amino acid
  misc_feature (93)..(93): Xaa can be any naturally occurring amino acid
  misc_feature (96)..(99): Xaa can be any naturally occurring amino acid
  misc_feature (102)..(102): Xaa can be any naturally occurring amino acid
  misc_feature (106)..(107): Xaa can be any naturally occurring amino acid
  misc_feature (110)..(110): Xaa can be any naturally occurring amino acid
  misc_feature (112)..(112): Xaa can be any naturally occurring amino acid
  misc_feature (120)..(120): Xaa can be any naturally occurring amino acid
  misc_feature (126)..(128): Xaa can be any naturally occurring amino acid
  misc_feature (130)..(130): Xaa can be any naturally occurring amino acid
  misc_feature (134)..(137): Xaa can be any naturally occurring amino acid
XXXXDXXXFXXXXXSXHNXXKDCWLIIXGKVYDVTXFMEDHPGGDEVLLXATGKDATDDFEDVGHSXXARXMMXXYXXGEVDXXTVPXKXXYXPPXXXXYNXDKTXXFIXKXLQFLVPLXILGLAXXXRXYTKXXXX

SEQ ID NO: 320 - protein, 494 aa, Argemone mexicana
MDETIWLIISTVIIVLGIAKFLLGKSSSSSLSTMEWPVGPKKLPIIGNLHQLGGDVFHVVLANLAKVYGSVFTIWVGSWRPMIIVSDIDKAWEVLVNKSSDYSARDMPDITKIISANWKNISCSDSGPFWHNLRKGLQGVALTPLNVASQYHLQERDMKNLINSMYKDASRKNGILKPLDYLKEETVRLLSRLIFGQDFQDEKLVVGMHHALDDLVRISGYASLADAFKFCENLPSHKKSIREVHEVKKRVENLIRPHIVSNPPTNTYLYFLKTQDFNEDIIISAILEVYDLGVDSTASTTVWALTFLVREQEIQEKLYREIVNVTGGKRSVKVEDVNKMPYLQAVMKETMRMKPIAPMAIPHKTSKDTSLMGKKINKGSVIMVNLYAIHHNPKVFPEPYKFMPERFLKDVNSDESLGNIKTMESSLLAFSAGMRICAGMELGKLQLAFGLASLVHEFKWSCSVDGKLPDLSEDHCFILLMKNPLEAKITCRIH

SEQ ID NO: 321 - protein, 504 aa, Argemone mexicana
MEEKIMTNNSPWILTSSTTTTTTILLSLLFTIFIILRRNKSSSSKMVWPTGPKTLPIIGNMNILGGTALHVVLHNLAKTYGNVMTIWIGSWRPVIVVSDIDRAWEVLVNKSSDYSARDMPEITKLATADWKTISSSDSGPFWTNLRKGLQNVALSPQNLSSQSKFQERDIIKTIQNLKEEAKMNNGIVKPLDHLKKAMVRLISRLIYGQDFDNDEYVEEMHHTIEELIRVSGYARLAEAFYYAKYLPSHKKAVREVLQANQRVQNLVRPLLSLNSPTNTYLHFLRSQNYEDEVIIFAIFEAYLLGVDSTSSTTAWALAYLIREPNVQEKLYEELKNFTNDNDRKMVKFEDLNKLQYLQAVVKETMRMKPIAPLAIPHKACRETSLMGRKVNQGTRVMVNIYALHHNQNVWKEPYKFNPERFLQKNQDGVDGKAMEQSLLPFSAGMRICAGMELGKLQFSFALANLVNAFKWSCVSDGVFPDMSDQLGFVLLMKTPLEAGIVPRM

SEQ ID NO: 322 - protein, 494 aa, Aquilegia formosa
MEVSLWLVSVTLAIVLVIKIFIRMYMSAYSSFSQMKWPTGPKKLPIIGNLHQLGGDVLHVALAKLSNVHGSVMTVWIGAWRPTIVVSEIDKAWEVLVNKSSDYAARDMPEITKFASASWHTIATSDAGTFWQTVRKGLQSGAMAPLNIAAQSQFQERDMKRLIQAMTDEAAKKNNILKPLDHIKKNTMRLLSRLIFGQSFDDDKFIESMHYELDDLIRIGGYAHLAEAFYYAKYLPSHKKAEREAYLVKCRVEELVRPLLTSNPPTNSYLYFLLSQNFPEEVIIFCVFEVYLLGVDSTSSTTTWALAYLIREEAVQEKLYQDIKMTIGDVDLVKIEDVSKLKYLQAVVKETMRMKPIAPLAIPHMTAKDTTLMGTKVAKGTRIMVNLYALHTNQKIWTEPYKFIPERFMQGDENEGVTNNKAREQSFLPFSAGMRICAGMDLGKLQFAFSLANLVNALKWSCVEEDRYPDMSEELGFVLLMKTPLVAKITARNS

SEQ ID NO: 323 - protein, 494 aa, Aquilegia formosa
MGVVSLWLVSATLAFVLAITILIRKFTSSSSSSFSQMKWPTAPKKLPIIGNLHQLGGDVLHVALAKLAKVHGSVMTVWIGTWRPIIVISDIDRAWEVLVNKSSDYGARDMPEITKIASASWHTISTSDAGAFWQTVRKGLQSGAMGPLNIAAQAQFQERDMKRLIQALTDEAATNNNIVKPLDHIKKNTVRLLTRLIFGQTFDDDKFVESMHFEIDDIIRISGYAQLAEAFYYAKYLPSHKKAEREAYLVKCRVEELVRPLLSSNPPTNSYLYFLLSQNFSEEVIIFCIFELYLLGVDSTSSTTTWALAYLIREKAVQEKLYQDNRMTLGDVDLVKIEDVNKLKYLQAVVKETMRMKPIAPLAIPHKTAKETTLMGTKVAKGTRIMVNIYALHHNQNIWTEPYNFMPERFLQGEDGSATNKAMEQSFLPFSAGMRICAGMDLGKLQFAFALANLVNAFKWSCAEEGKFPDMSEELSFVLLMKTPLEAKITARKF

SEQ ID NO: 324 - protein, 490 aa, Corydalis cheilanthifolia; identical to SEQ ID NO: 159

SEQ ID NO: 325 - protein, 501 aa, Corydalis cheilanthifolia
MVNAVAEILTEKPWLLPATLLAVIAIAKFFLGKSSTMKWPIGPKTLPIIGNMHQLGGTDLQVVLANLAKTYGTIMTIWVGSWRPMIVLSDIEKAWEVLVNKSSDYSGRAMPEITEIISAKGKTISTSDSGPHWSNLRKGLQNVALSPHNIAAQSRFQESDITKMIKTLKQEAASNNGIVQPLDHLKKSTVRLISRLIFGQDFDDDEYVEAMHLAVEELIRVSGYARLAEAFYYAKYLPSHKRAVSEVWEANRRVKRIVKPRLSANPPPNCYLHFLSSQDYSEEMIIFAIFEAYLLGVDSTSSTTAWALGFLIREPKVQERLYQELKNCAGENGLIKVEDINKLPYLQAVLKETMRMKPIAPLAIPHKAVRETSLAGNKVEPGTRVMVNLYAIHHNPKVWIDPHKFKPERFLQGEENGGGNLKLMEQSLLPFSAGMRTCAGMELGKLQFGFSLANLVNAFQWDCAKKGMFPDMSDLLGFVLLMKTPLQAKIVPRGSPSINGY

SEQ ID NO: 326 - protein, 502 aa, Corydalis cheilanthifolia
MVNAVAEILTEKPWLLPATLLAVIAIAKFFLGKSSTMKWPIGPKTLPIIGNMHQLGGTDLQVVLANLAKTYGTIMTIWVGSWRPMIVLSDIEKAWEVLVNKSSDYSGRAMPEITEIISAKGKTISTSDSGPHWSNLRKGLQNVALSPHNIAAQSRFQESDITKMIKTLKQEAASNNGIVQPLDHLKKSTVRLISRLIFGQDFDDDEYVEAMHLAVEELIRVSGYARLAEAFYYAKYLPSHKRAVDSAWEVNRTVKRIVKPLLLVKPPTNCYLHFLTSQDYSEEVIIFAILEVYLLGVDSTSSTTAWALGFLIREPRVQEKLYQELKNFAGENGMIKVEDINKLPYLQAVLKETMRMKPIAPLAIPHKAVRETSLAGNKVEPETRVMVNIHAIHHNPEVWMDPYKFKPERFLQGEDINGGGNLKLMEQSLLPFSAGMRTCAGMELGKLQFGFSLANLVNAFQWDCAKKGMFPDMSDLLGFVLLMKTPLQAKIVPRGSPSINGY

SEQ ID NO: 327 - protein, 503 aa, Corydalis cheilanthifolia
MVAAVVEILKEKAWLLPTTLVAIIAIAKLFLAKSSTVKWPTGPKTLPIIGNMHQLGGTELQVTLTRLAKTYGNIMTIWVGSWRPMIVVSDIEKAWEVLVNKSSDYSGRAMPEITQIGSANWKTISTSDSGPHWSNLRKGLQNVALSPHNIAAQSRFQESDISKMIKALKQAAVANNGIVLPLDHLKKTTVRLISRLIFGQDFDDDEYVEAMHLAVEELIRVSGYARLAEAFYYAKYLPSHKRAVDSAWEVNRTVKRIVKPLLLVKPPTNCYLHFLTSQDYSEEVIIFAILEVYLLGVDSTSSTTAWALGFLIREPRVQEKLYQELKNFAGENGMIKVEDINKLPYLQAVLKETMRMKPIAPLAIPHKAVRETSLAGNKVEPETRVMVNIHAIHHNPEVWMDPYKFKPERFLQGEDINGGGNLKLMENSFLPFSAGMRICAGMELGKLHFGFSLANLVNAFQWDCAKKGKLPDMSDLLGFVLFMKTPLEAKIVPRGSSSNINGY

SEQ ID NO: 328 - protein, 489 aa, Coptis chinensis
MEMSPLLVCATVAIVFATTTIIRILFSSSSLPQMKWPSGPRKLPIIGNLHQLGDDVLHVALAKLAKVHGSMMTIWIGSWRPVIVISDLEKAWEVLVNKSADYGARDMPEITKIASASWHTISTSDAGPFWQNVRKGLQSGAMGPFNVAAQNQHQERGMKRLIKAMSDEAANNNGIVKPLDHIKKNTVRLLTRLIFGQNFDDNKFIESMHYEIEDIIRISGYARLAEAFYYAKYLPSHKKAEREAFLVKCRVQELVRPLLSSNPPTNSYLYFLLSQNFEEEVIIFCIFELYLLGVDSTSSTTTWALAYLIREQGAQEKLYQDIRMTLGDVDLVKIEDVNKLKYLQGVVKETMRMKPIAPLAIPHKTAKETTLMGTKVAKGTRIMVNLYALHHNQNIWPDPYKFMPERFLEGATGTAYNKAMEQSFLPFSAGMRICAGMDLGKLQFAFALANLVNAFKWSCVEEGKLPDMGEELSFVLLMKTPLEARIAGR

SEQ ID NO: 329 - protein, 491 aa, Coptis japonica
MEMNPLLVCATVAIVFATTTIIRILFSSSSLPQMKWPSGPRKLPIIGNLHQLGDDVLHVALAKLAKVHGSVMTIWIGSWRPVIVISDIEKAWEVLVNKSADYGARDMPEITKIASASWHTISTSDAGSFWQNVRKGLQSGAMGPLNVAAQNQYQERDMKRLIKAMSDEAANNNGIVKPLDHIKKNTVRLLTRLIFGQAFDDNKFIESMHYEIEDIIRISGYARLAEAFYYAKYLPSHKKAEREAFLVKCRVEELVRPLLSSKPPTNSYLYFLLSQNFEEEVIIFCIFELYLLGVDSTSSTTTWALAYLIREQGAQEKLYQDIRMTLGDVDLVKIEDVNKLKYLQGVVKETMRMKPIAPLAIPHKTAKETTLMGTKVAKGTRIMVNLYALHHNQNIWPDPYKFMPERFLEGETGTAYNKAMEQSFLPFSAGMRICAGMDLGKLQFAFALANLVNAFKWSCVEEGKLPDMGEELSFVLLMKTPLEARIAGRNV

SEQ ID NO: 330 - protein, 491 aa, Coptis japonica
MEGSFLWLIGSTVAIVLVITTIVRMSSSSSSSKKKWPSGPKRLPIIGNLHLLGGDLLHVTLAKLAKVHGSVMTIWIGRWRPIIVISDINSAWEVLVSKSAEYGQRDTPDIFKTLTVGQNNISMSDIGPFWHNVRKGLQNGALSPLNVAAQTQFREEDVKRLIHEMSREALNKNGIIKPLDHMKKNTARLLGRLIFGPTFDNDKFVESVLYEIEDVLRLSGYARLTEAFYYAKYLPSQKKVAREAYLAKYRIEELMRPLLSSNPPTNSYLYFLQSQNYSKEIIIFCTFELFLLGVDSTSSTATWALAYLIHEQAVQEKLNEDIRMTIGDVDLVKIEDLSKLKYLQAVVKETMRMKPIAPLAIPHKTANDTTLMGTKVARGTQIMVNLYALHHNEDIWPEPYKFMPERFLQGENVSANNKAMEQSFLPFGAGMRICAGMDLGKLQIAFALANLVNAFKWSCVDEGKLPDMSEQLFAVTLMKTPLEGRISTRKV

SEQ ID NO: 331 - protein, 508 aa, Coptis japonica
MALRNMVAMVAEMEGSLLLAGATLAILLTISTIVRITSSPSSSFSQMTWPSGPKKLPIIGNLHQLRGELLHVTLAKLAKVHGGVMTIWMGSWVPIIVISDINSAWEVLVNKSADYGAREVTYLHELLRDSAMHPHNISSSDVGPLWHNIRKGLQSGALSPLSVASQTQHRERDMKRVVHEMSREIVNNNGTIKPLVHIKNSTARLLGRLIFGPSFNDSKFIESMLYEIEDFIRTSSYTSLTNSFYYAKYLPSQRKATREAKLGKYRIEELVRPLLSSKPPTNAYLYFLLSQNLSEEVTIFCIFELFLLGVDSASSTTTWALAYMIREQEAQEKLYQDIRMTIGDVDLVKIEDVNKLKYLQSVVKETMRMKPIAPLALPHNAGKDTTLMGTKIVKGTRVMVNLYALHHYEDVWLEPSKFMPERYLQGEDGSVTHKAMEQSLLPFGAGMRICAGMDLGKLQVAFVLANLVNAFKWSCVEDGKLPDMTEELFGLIILMKTPLEGRISPRTV

SEQ ID NO: 332 - protein, 501 aa, Chelidonium majus
MEGSLWIILSILVGAVMILVQNLWKRWSKTSEDMILPPGPRKIPIIGNLYQLNRGGELIHVALAKLAQEHGKMMTIWFGGGQPSIVVSHHEVAWEVLVTKAADYSSRTLPFMSRVTSADWHTLATSNLGPFWQTLRKGLRSTTLNPHTISAQVQLQEEDVTRMILSFKEQACLNDGVVKPLIPLRRTTVQLIGRFCFGPEFKNDDDFVEEMDIVIEDVISLTGHGRLIDIFEFTRYIPGLNLPFKQAYKVKQRIIELIRPYIDYHKSSKSPCPNCYLHFLLSHDYDEEVITFNLFELFLLAVDSTSNATAWALAYLIHDQKIQQKVYDEVSEFGRKEMVTIEEVSKLKYVNAVVKEIIRMKPIAPLAVPHQADRDSKLMGIQVKKGTPVLVNLYAMHYDPSIWIEPSRFMPERFLVGHPQNVHCGEDHMAVMERSLIPFGAGRRICAGMDLAKLQVALTIANLVNSFQWSSAVEGQLPDLTEDLTFILRMKTPLAARIIPR

SEQ ID NO: 333 - protein, 490 aa, Chelidonium majus; identical to SEQ ID NO: 166

SEQ ID NO: 334 - protein, 495 aa, Chelidonium majus
MEEINVEWISTAATTIGIIVVVFATVSMMFGRRRKSSMKWPNGPKTLPIIGNMHQLGGTALQVVLHKLADVYGSVMTIWIGSWRPVIVVSDIDKAWEVLVNKSSDYSARDMPEITRINTANWSTISTSDSGPHWSNLRKGLQNVALSPLNVAAQSQFQEKDINQVIKNLQEESALNGGIVKPLDHLKKATVRLLSRFIYGQNFDDDTYVENMHNEIEELIRISGYARLAEAFYYAKYLPSHKKVEKAVEEAHYRVKALISPFLTRNPPPNSYLHFLRSQNYPEEVIIFCIYEVYLLGVDSTSSTTAWALAYLVRESAVQEKLYQELNNFIGDRQQMGSAIKVEDVNKLQYLQAVMKETMRMKPIAPLAIPHKACKDTSLGGNKVDKGTKVMVNLHAIHHNPKVWNEPNRFKPERFLQLKDKKEMEQSYLPFSAGMRTCAGMELGKLQFGFALANLVYAFQWSCVADGKPPDMSDLLGFVLFMKTPLEARIVPRVR

SEQ ID NO: 335 - protein, 509 aa, Chelidonium majus
MLLILIMDFRNSRSNLNPAKMEELMSDPWIITATTLAVVILLTTILRRKSSSMKWPKGPKTLPIIGNMHLFGGTDLHVVLYNIAKVYGNVMTIWIGSWRPVIVISDIERAWEVLVNKSSDYSARDMPEITKLISSDWKTISTSDAGAFWTNLRKGLQNVALSPHNLASQFQFQESDIKKLIETIKEEAAVNNGIVKPLDHLKKAMVRLISRLVFGQDFDNDEYVEGMHHAIEELIRVSGYARLAEAFYYAKYLPSHKKAVRDVEEANRRVQKLVRPFLSLNPPTNTYLHFLRSQNYSEEVIIFAIFEAYLLGVDSTSSTTAWALAFLIREPNVQEKLYQELKNFTVKNGRDMLKVEDINKLPYLQATIKETMRMKPIAPLAIPHKACRDTSLKGSKIDKGTRVMVNIYALHHNEKIWKEPFKFMPERFLQTEGENGKAMEQSFLPFSAGMRICAGMELGKLQFNFALANLVNAFKWSCVADGVLPDMSDQLGFVLVMKTPLEARITSRC

SEQ ID NO: 336 - protein, 487 aa, Cissampelos mucronata
MDQTNILLAVAAALFIGLLTKLLASNSKHHLPPGPKPLPIIGNMLELSKGGELLHVSLAKLAERYGEIMSFWFGGFEPSIVVTSHELVWEVMVTKANDFSDRALPWLTKILTSNWQTLATCDLGPYWYSIRKGLQSTTLNHQTIMSQTQLQERDIADLLTSLEQEASSNNGIVKPYPMLRKLMVRLVSRFCFGPDFPNDEEFVERMDSTLDESIHQSGHTRLADLFEFTRYVPGLWGPFKESESLKRRIVNLLTPHLKAASSPNCYSSLLLSKGLSEEVVVLNLYELFELAVDATSNTTAWALAFIIHNKDAQEKVFKEVRYNQVGERRKIIRVEELGEMEYVQAVAKETIRMRPIAPVMPHKAARDGELKGVKVRGGTPVLMNFYAVLHDEKVWREPYKFTPERFTTKGVDAEAMERSYVSFGVGRRSCPGMELAKIQIAVTVANLVNRFEWCSAAEGELPDLSEGLTFVLMMKTPLVARIVPRSY

SEQ ID NO: 337 - protein, 502 aa, Cissampelos mucronata
MDVHYSTLLIALATLASLLLLSKLLLRSINTSKHHQWPPGPNKLPLIGNLHQFRGDLLHQNFAELAQKYGKLMTVWIGSQQPFIVVTDPDLAWEVLVTRAVDYWSRQMLYLSRIISAGNRTLATSDGGPYWETLRRGLQSTALSPQTISSQTKLQEQDIAHMIASLQQEASLNDGLVKPLPHIRKLAIRLLARLCFGADFPNDEHFVERMDELLEDDMRLLTAAGLVDVFEFTRHIPGLTPRLKEIEDHMEGIKGLIRPCLAAAMKKKGNSISLGNTHMNFLISQGFTEEIIILNLFEVFVFGVDSTSISLSWALGFLIDGRETQEKVLKEIVSKLGGSRRVVGVGDVSGMEYVHAVVKETLRMRPVAPMAVPHKAARDSELMGFKVKEGTPFFVNLYALHHNEKAWKDANKFVAERFVKGDGAEEYLKKMERYYIPFGAGRRACPGMELAKVHLAMVVANLVNSFEWQSAVEGQPLDLSETLNPLLVMKTPLVARLVPRFA

SEQ ID NO: 338 - protein, 490 aa, Eschscholzia californica
MEESLWVVTATVVVVFAIAKLLKKSSSISTMEWPKGPKKLPIIGNLHQLGGEAFHVVLANLAKIHGTVMTIWVGAWRPMIVISDIDKAWEVLVNKSSDYAGRDFPEITKIISANWKNISCSDSGPFWQNLRKGLQGGALAPLNVISQYQLQERDMKNLITSMQEKASKNNGILKPLDYLKEETIRLLSRLIFGQSFNDENFVKGVHLALDDLVRISGYASLADAFKFCENLPSHKKSIREVHEVNERVVNLVKPYLVKNPPTNTYLYFLNSQKFSDEVIISAVLEVYDLGVDSTASTAVWALTFLVREPRVQEKLYKEIIDLTGGERSVKVEDVSKLPYLQAVMKETMRMKPIAPMAIPHKTSRDTSLMGKKVNKGTSIMVNLYAIHHNPKVFPEPYKFIPERFLQGQESKYGDIKEMEQSLLPFSAGMRICAGMELGKLQYGFSLASLVEAFKWTCAVDGKLPDLSEDHCFILLMKNPLEARITPRTQL

SEQ ID NO: 339 - protein, 495 aa, Eschscholzia californica
MEEMKFLMMNNPWVLTATFTTLLISIFLFVTRKTSNTEWPNGPKTLPIIGNMHLLGGTKALQVILHNLAKVYGGVMTIWIGSWRPVIIVSDIERAWEVLVNKSSDYSARELPEIIKYNAANFRTIATCDSGPHWSNLRKGLQNVALSPHNLAAQFQFQEKDITKMIQNLEVEAKNNNGIVQPLDHLKKATIRLISRLIFGQDFDEDTYVEKLHHTIDELIRMSGYAQLAEAFYYARYLPNHKKAVNHAAKTKQIVTHLMRPFLSLNPPTNSYLHFLQSQNYDEELIIFSIFEVYLLGVDSTSSTTAWALAYLVREPNVQETLYQELDNFAKQNDRKILKVEDINKLQYLQAVTKETMRMKPIAPLAIPHKASRDTTLMGKKVEKGTKVMVNLHALHHNENVFNDPYKFMPERFLKSYQGAKAKAMEQSYLPFSAGMRICGGMEVGKLQFGFALANLAYAFKWSCAVNGVLPDMSDELGFVLFMKTPLEARIVRRN

SEQ ID NO: 340 - protein, 495 aa, Eschscholzia californica
MEEMKILMMNNPWILTATATTLLISIFLFFTRKSSKMVWPAGPKTLPIIGNMHLLGGTALQVVLHNLAKVHGSVMTIWIGSWRPVIVVSDIERAWEVLVNKSSDYSARDMPDITKIISADWKTISTSDSGPHWTNLRKGLQNVALSPHNLAAQFQFQEKDMTKMIQTLQEEARNNNGIVKPLDHMKKATLRLISRLVFGQDFNNDKYVDDMHLAIEELIRVSGYARLAEAFYYAKYLPSHKKAVREVEEAQRRVQNLVSPFLSLNPPTNTYLHFLRSQKYDDEVIIFAIFEAYLLGVDSTSLTTAWALAFLIRESNVQEKLYQELESFASKMDRKILKVEDINKLQYLQAVIKETMRMKPIAPLAIPHKACRDTSLMGKKIDKGTRVMVNIYALHHNKNVFNDPFKFMPERFMKVDSQDANGKAMEQSLLPFSAGMRICAGMELGKLQFSFALANLAYAFKWSCVADGVLPDMSDQLGFVLLMKTPLEARINRRN

SEQ ID NO: 341 - protein, 495 aa, Eschscholzia californica
MEEMKFLIMNNPWVLFATSATLLISIFLFFRRKSPNMAWPEGPKTLPIIGNMHLLGGTALQVVLYNLAKVHGRVMTIWIGSWRPVIVVSDIEQAWEVLVNKSSDYSARDMPDITKIVTADWRTISTSDSGPHWSNLRKGLQNIAISPNNLAAQFQFQEKDIIKMIQILEQEAKDNNGIVKPLDHLKKATIRLISRLVFGRDFEEDKYVEDMHHAIEELIRISGYARLAEAFYYAKYLPSHRKAVRYVEELKQIVKNLIRPFLSVNPPTNTYLHFLRSQNYDEEVVIFAIFETYLLGVDSTSSTTAWALAYLVREPSVQDRLHQELDHFAKQNDRKILKVEDMNKLQYLQAVIKETMRMKPIAPLAIPHKACKDTSLMGNKINKGTRVMVNLYALHHNKNVFNDPFKFMPERFLKVDNQDAKGKAMEQSLLPFSAGMRICAGMELGKLQFSFALANLIFAFKWSCVDDGVLPDMSDELGFVLLMKTPLKARINPRN

SEQ ID NO: 342 - protein, 494 aa, Eschscholzia californica
MEEMKILMMNNPWVVTATSATLLISMFLFFTRKSSKMVWPKGPKTLPIIGNMHLLGGSKALQVILHNLSKVHGSVMTIWIGRWRPVIVVSNIERVWEVLVNKSSDYSGRYVPDVIKFVSADFRTISTSDSGPHWTNLRKGLQNVALSPNSLAAQFQFQEKDIIKMTDILEREARNNKGIVKPLDHLKKATVRLISRLVFGPNFNDDQYVEDMHNTIDELIQMSSYAQLAEAFYYAKYLPSHRKAVRHFEQTKQIVKKLIRPYISVSPPPNTYLHFLQSQNYDEEVVIFAIFEAYLLGVDSTSSTTTWALAFLIREPNVQEKLYQELKNFAEQNDREIMKVEDINKLQYLQAVTKETMRMKPVAPLAIPHKACRETSLMGMPIDKGTKVMVNIHSLHHNENVFSDPFTFMPERFLKVDNQNVKAMEQSYLPFSAGMRICAGIELGKLHFGFALANLVYAFKWSCVADGVLPDMSEELGTILFMKTPLEARIVRRN

SEQ ID NO: 343 - protein, 495 aa, Eschscholzia californica
MEEIKILIMNNPWILTATATTLLISMFLFFTRKSSKMVWPQGPKTLPIIGNMHLLGGTALQVVLHNLAKVHGSVMTIWIGSWRPVIVVSDIERAWEVLVNKSSDYSARELPDIIKYNTADCRTIATCDSGPHWSNLRKGLQNVALSPNNLAAQFQFQEKDVIKMIDILEQEAINKNGIVKPLDHLKKATIRLISRLVFGQDFNDDKYVEDLHQAIEELIRMSGYAQLAEAFYYAKYLPSHKKAIRHAELTKQIVTNLVRPFLSLNPPTNSYLHFLQSQKYDEEMVIFAIFETYLLGVDSTSSTTAWALAYLVREPNVQDRLYNELNNYANYNDRKILKVEVINKLQYLQAVTKETMRMKPIAPLAIPHKACRDTSLMGTKIDKGTKVMVNLHALHHNENVFTDPFKFMPERFLKVNNEDVNMKAMEQSLLPFSAGMRICAGMELGKLQFSFALANLVYAFKWSCVDDGVLPDMSDELGFVLFMKTPLEARIVRRH

SEQ ID NO: 344 - protein, 500 aa, Glaucium flavum
MGRFLAPDIEMEESFWLVTATVIVVFAVAKFFTRSSSISKMEWPAGPKKLPIIGNLHQLGGNVFHVVLANLAKVHGSVMTIWVGSWRPMIVISDIEKAWEMLVTKSSDYSGRSFPEITKIISANWKNISCSDSGPFWTNLRKGLQGGALAPLNVISQYHLQEKDMENLVKSMRVEASKNNGNIKPLDHLKQETVRLLSRLIFGQDFHDEKLVVGMHHALDDLVRISGYASLADAFKIAENLPSHKKSIREVHEVNERVKKLVRPHIVSNPPTNTYLYFLQSQKFSEDVIISAILEVYDLGVDSTASTTVWALTFLVREQEIQEKLYQEIKSVSGGRSTVKVEEVSKMPYLQAVMKESMRMKPIAPMAIPHKAQRETTLMGKKVDKDTVLMVNLYAIHHNPNVFPEPFKFMPERFLQGEDHHNGGNIKAMEQSLLPFSAGMRICAGMELGKLQLAYGLASLVNAFKWDCAVDGKLPDMSEDHCFILLMKNPLEARITPRTH

SEQ ID NO: 345 - protein, 490 aa, Glaucium flavum
MVEISVQWILTTSVVVLVFAIASKMFANGRKSSMKWPEGPKTLPVIGNMHQLGGTALQVVLHKLADVYGSVMTIWIGSWRPVIVVSDIDRAWEVLVNKSSDYSAREMPEITRINTANWRTISTSDSGPHWSNLRKGLQNVALSPLNVAAQSQFQERDINQVIKDLQEEAALNNGIVKPLDHLKKATVRLLSRFIYGQNFHDDKYVESMHYEIEELIRISGYARLAEAFYYAKYLPSHKKLEKAVEEAHYRVKALISPLLTSDPPPNSYLHFLLSQNHPEEVIIFCIYEVYLLGVDSTSSTTAWALAFLVREPAVQEKLYQELSNFVGDRQQMGCAVKVEDVNKLQYLQAVMKETMRMKPIAPLAIPHKACKDTSLGGNKVDKGTRVMVNLHALHHNPKVWKEPNTFKPERFLELKDKEMEQSFLPFSAGMRTCAGMELGKLQFGFALANLVNAFQWTCVADGKLPDMSDLLGFVLFMKTPLEARIVPRVR

SEQ ID NO: 346 - protein, 504 aa, Glaucium flavum
MEMKSSVVFSYPAMEELFKSNPWVITGTTLAVLILMTTMFRKKSLSMKWPKGPKTLPIIGNMHLLGGTNLQVILHNMSKVYGNVMTIWIGSWRPVIVVSDIERAWEVLVNKSSDYSGRDMPEITKIISADWKTISTSDSGPHWTNLRKGLQNVALSPHNLAAQFQFQERDICKLIETLKEEAKLNNGIVKPLDHLKKATIRLISRLVFGQDFDNSKYVEDMHHAIEELIRVSGYARLADAFYYAKYLPSQKKAVRDVEEAQRRVQRLVRPFLSLNPPTNCYLHFLRSQNYSDEVIIFAIFEAYLLGVDSTSSTTAWALAFLVREPNVQEKLYQELKNFTAKNGREMLKVEDINKLPYLQAVIKETMRMKPIAPLAIPHKACRDTSLKGRKIDKGTQIMVNIYALHHNENVWKEPFKFMPERFLQTDQDVNGKAMDQSLLPFSAGMRICAGMELGKLQFSFSLANLLNTFQWSCVADGVLPDMSDQLGFVLLMKTPLEARITPRC

SEQ ID NO: 347 - protein, 492 aa, Hydrastis canadensis
MAEIELGLWLGGAVVAIVLSTILFRSSSSSSSFSSQTKWPAGPKKLPIIGNMHQLGGDVLHVALDKLSKIHGGVFTFWIGSWRPVIVISDIDKAWEVLVNKSSDYSARDMPEITKIGSASWHTISTSDPGPFWQNVRKGLQGGAMGPLNMSAQTPFQEKDMKNLIETMKIEAENNNGIIKPLDHIKKNTVRLLSRLIFGQMFEDDKFIESMHYEIEDIIRISGYARLAEAFYYAKYLPSHKRAEKEAFLVKCRVEDLVRPLLKSNPPSNSYLYFLLSQNYPEEVIIFCIFELYLLGVDSTSSTTTWALAYLIREQAVQEKLYQDIKVTIGNANLVKVEDVNKLKYLQGVVKETMRMKPIAPLAIPHKSSKDTTLMGTKVAKGTRLMVNLYALHHNQNIWSEPFKFMPERFLEDGNNNKAMEQSFLPFSAGMRICAGMDLGKLQFAFALANLVNAFKWSCVEEGKFPDMSEEFSFVLLMKNPLEARITPRKAH

SEQ ID NO: 348 - protein, 489 aa, Mahonia aquifolium
MEFTVWVVSFNVLVVVAMSMFLLRTKSSSSTTKWPIGPKKLPIIGNLHLLGGDVLHVALAKLAKVHGGIMTIWIGSWRPVIVVSDIDKAWEVLVNKSSDYSARDMPEITKIASASWHTISSSDSGPFWQNLRKGLQNGALGPANISAQSQLQERDIKRMIGDLQKEAKINGGIVKPLDHIKKAAVRLLSRLIFGHTFDDDSFIESMHHEIEDLIRISGYARLAEAFSYAKYLPSHKLAVKEAYEVKHRVEQLVRPLLTSSPPANSYLNFLLSQDYSEEVITFCIFEIYLLGVDSTSSTTTWALSYLIHEQQVQEKLYQSIKGVTSDDDGLVKAEDLSKLQYLQAVMKETMRIKPIAPLAIPHKASKDTKLMGTKVAKGTRVMVNLYALHTKENIWSDPEKFKPERFLHGDEGVNVKAMEQCFLPFSAGMRICAGMELGKLQFSIALANLVKAFKWTSVVDGELPDMSEELSFVLLMKTPLEARIIPRDL

SEQ ID NO: 349 - protein, 499 aa, Menispermum canadense
MGEGSLWIVATTLVMVGVLIFMMEQSLLWRRRSTQKWPPGPTKFPFIGNLYQLNKGGELVHVTLTKMAQQYGRIMTIWFGSQEPTIVVSDHELAWEVLVTKSSDYSSRTLPYLSRVTSADFHTLATCDLGPYWQTLRKGLQAFTINPHNISSQIHLQEKDIADLVLSLEEEASLNNGVVDPLPKLRRLLILLIRRFCFGPDREFNDDLFVERMDCALEDVIRLFGHARLIDVFEFARYIPGIGLGPFQEVKRLKQRIKELIRPYILAHKSSNSACQNCHLNFLLSQGFTEDVVILNLFELFMLGVDSTSAAIAWALAFVIHEEETQQKLVDEVINKLGRGRRMVGVEEVSELEYVQAVVKETMRMKPIAPLPVPHRAVRDSELKGTKVREGTQVLVNLYAVLTDGRVWKEPNRFMPKRFLQSQRGEDMRAMIMGMERSFIPFGAGRRICAGMELAKPQVALTLANLVYKFQWCSEVEGQLPDLSEDLTFVLRMKTPLVA

SEQ ID NO: 350 - protein, 497 aa, Nandina domestica
MEAISLWTVSASFLTLLALAIILPRTRNSSSIINWPPGPKTLPIIGNLHQLGGQLLHVALTNLAKVHGGVMTIWIGSWRPIIVISSPEEVWEVLVKKSPDYAARDMPEITKLITGYWHTISSSHSGQFWSNLRKGLQNGPLGPLNITTQMSFQERNIKRMISDIQEEATFNGGIVKPLEHLKKATLRLLSHIIFGQSFDDDQFIDSMHHQIEELIRINGFAPLVDAFSYAKYLPSHKRAIKETYRVKNQIEQLVRPVIASSPPANCYLHFLLSQGYSEEVVIYSIVELYSLGVDSTASTTTWALAFLIHDQTVQDKLYQDIKHIAATDALVKIEDLSALHYLEAVMKETMRMKPIAPLAIPHKTSKDTTVRGTKVAAGTCVLVNLYALHHDHKIWAKPHKFMPERFLEGNVNGGDSSGANVKVIEQSFLPFGAGMRICAGMELGKLQFSFALANLVNAFKWTSVVDGKLPDMSEELKFIMLMKTPLEARIIPRNSLN

SEQ ID NO: 351 - protein, 496 aa, Nandina domestica
MDPMSLWAAIAIVLVMTLLVLLQTRTKSLPSSSTQWPTGPKTLPIIGNLHQLEGDVFHVALAKLAKMHGDIMTIWIGSWRPVIVISDYDKAWEVLVNKSSDYSARDMPEITKIASAGWRTISLSSSGPFWHTLRKGLQNGPFGPLNVSAQILSQERDMRRMIRDMQEEADINGGIVKPLGHLKKATVGLLTRLIFGQNFDDDSFIESIHHETEELIRISGYARLAEAFSYAKYLPSHRRAVKESYECKHRVEELVKPLLSSNPPKNSYLNFLQSQDYPEEVIIFCIFEIYLLGVDSTSSTTTWALAFLIHEPAVQEKLYQEVKCITNGDGGLVKAGDLSKFQYLQAVMKETMRMKPIAPLAIPHTTSKDTTLMGTKVAKGTRIMVNLYALHHNPNIWSEPFKFMPERFLQEQFNGVGGDANVKAIEQSFLPFSAGMRICAGMDLGKLQFSFALANLVNAFKWTTVADGKFPDMNEELSFVLLMKTPLEARIVPRKP

SEQ ID NO: 352 - protein, 501 aa, Nandina domestica
MDPMSLWAVSTIVVVVTTLLVLLRMRTKSSPSSSTQWPSGPKTLPIIGNLHQLGGDVLHVVLAKLAKVHGNIMTIWIGSWRPVIVISDYDKAWEVLVNKSSDYSARDMPEITKIASAGWRNISSSNSGPFWHSLRKGLQNGPLGPLNISAQIFSQERDMKRMIHDMQEEAAMNGGIVKPLDHLKKASVRLLNRLIFGQNFDDDSFVESIHHETEELIRISGYARLAEAFSYAKYLPSHRRAVKEAYEGKQRVEELVRPLLSSNPPPNSFLHFLMSQDYPEEVIICCILEIYLLGVDSTSSTTTWALAFLVHNQTVQEKLYQAIKCVIDGDGGLVKTGDLSKLHYLQAVMKEAMRMKPIAPLAIPHTASKDTTLMGTKVAKGTRVMVNLYSLHHNPNIWTEPFKFMPERFLQEEFNGGSGGGGGDANVKAMEKSFLPFSAGMRICAGMDLGKLQFSFALANLVNTFKWTSVADGKLPDMSEELSLVLLMKTPLEARIVPRNP

SEQ ID NO: 353 - protein, 496 aa, Nandina domestica
MEESFWIVSATIVVVFVIATMFRKSSSISSKTEWPAGPKKLPVIGNLHQLGGDVLHVVLANLAKVYGTVMTVWVGSWKPMIVISDIDRAWEVLVNKSNDYSGRDLPEITKIISANWKNIMTADAGPYWTSLRKGLTGHTLAPTNVASQSHLQEKDMNNLINRMKNQAASNNGIIKPLDHLKEETVRLLSRLIFGQHFEDEHFVEGIHQALDDLVRISGYASLADAFKFCENLPSHKKSISGVHEILSRVRNLVRPYIVPNPPTNTYLHFLQSQKFTEEVIIACILEVYDLGVDSTAATTVWALTFLVREPEVQEKLYREIQTVIGDRGTVKVEDISKMTYLQAVMKETMRMKPIAPMAIPHKAVRETTLMGNKIDKNTVVMVNLYAIHHNPKVFPEPYKFRPERFLAGGDGKFGNLKAMEQSLLPFSAGMRTCAGMELGKLQFGFSLANLVNAFQWDCAKKGMFPDMSDLLGFVLLMKTPLQAKIVPRGSPSINGY

SEQ ID NO: 354 - protein, 501 aa, Nandina domestica
MVNAVAEILTEKPWLLPATLLAVIAIAKFFLGKSSTMKWPIGPKTLPIIGNMHQLGGTDLQVVLANLAKTYGTIMTIWVGSWRPMIVLSDIEKAWEVLVNKSNDYSGRDLPEITKIISANWKNIMTADAGPYWTSLRKGLTGHTLAPTNVASQSHLQEKDMNNLINRMKNQAASNNGIIKPLDHLKEETVRLLSRLIFGQHFEDEHFVEGIHQALDDLVRISGYASLADAFKFCENLPSHKKSISGVHEILSRVRNLVRPYIVPNPPTNTYLHFLQSQKFTEEVIIACILEVYDLGVDSTAATTVWALTFLVREPEVQEKLYREIQTVIGDRGTVKVEDISKMTYLQAVMKETMRMKPIAPMAIPHKAVRETTLMGNKIDKNTVVMVNLYAIHHNPKVFPEPYKFRPERFLAGGDGKFGNLKAMEQSLLPFSAGMRTCAGMELGKLQFGFSLANLVNAFQWDCAKKGMFPDMSDLLGFVLLMKTPLQAKIVPRGSPSINGY

SEQ ID NO: 355 - protein, 496 aa, Nandina domestica
MEESFWIVSATIVVVFVIATMFRKSSSISSKTEWPAGPKKLPVIGNLHQLGGDVLHVVLANLAKVYGTVMTVWVGSWKPMIVISDIDRAWEVLVNKSSDYSGRAMPEITEIISAKGKTISTSDSGPHWSNLRKGLQNVALSPHNIAAQSRFQESDITKMIKTLKQEAASNNGIVQPLDHLKKSTVRLISRLIFGQDFDDDEYVEAMHLAVEELIRVSGYARLAEAFYYAKYLPSHKRAVSEVWEANRRVKRIVKPRLSANPPPNCYLHFLSSQDYSEEMIIFAIFEAYLLGVDSTSSTTAWALGFLIREPKVQERLYQELKNCAGENGLIKVEDINKLPYLQAVLKETMRMKPIAPLAIPHKAVRETSLAGNKVEPGTRVMVNLYAIHHNPKVWIDPHKFKPERFLQGEENGGGNLKLMEQSLLPFSAGMRTCAGMELGKLQFGFSLANLVNAFQWDCAKKGMFPDMSDLLGFVLLMKTPLQAKIVPRGSPSINGY

SEQ ID NO: 356 - protein, 495 aa, Nelumbo nucifera
MQGNQGLILASVIFVVAIVQMMIRKRRTSPTAMKWPAGPRKLPIIGNMHQLSRADGLFHVALTKLAKVHGSVMTIWLGSWRPTIVVSDDEVAWEVLVNKSSDYAARDHPYIDKIMWAGARTIHTSDASPHWHSLRKGLQSGGLGPLSISGQTHLQEKDIAQMLRDMREEASLNGGLVKPFHHIRRTSVRLLCRLCFGPNFEDAKFSEAIDKAIEDIIRISGVGYLADAFFFGRHFPGLKHTFQEACDLKRRVEDLIRPFLRAVPPPNCYLHFLLSNNIPEDVTIFTILEVFTLGIDSTSSTATWALALLTNEQRVQQKLYQDIKKNIDSTQQIVRVEDVSKLQYLQAAVKETLRLKPVAPLVPHMTATETTLMGTKVAQGTRVVVNLHAIHYNPNVWPEPEKYMPERFMPRQEEVDEIRPGTTKLSYFLPFGGGMRACAGMEVGKLHVGFVIANIVNAFQWSSAVEGQPPDLTEDFKFVLLMKNPLTVRITARHP

SEQ ID NO: 357 - protein, 494 aa, Papaver bracteatum
MEENSWFITATITVIVVFVLAKFLASKIFSPTTMEWPAGPKTLPIIGNLHQLKGDLFHVVLQNLAKVHGGVFTIWIGSWNPVIIVSDFNIAREVLVSKSLDFSARSVPDYVKIVSAGGKTISESDCGPFWHGLRKGLQGVALNPLHLMSQSHLQERDMQNLIKSMQESASQEDGVIQPLDYIRKATIRLLSRILIGQDFSNEDFVDSMNHTLHKLVSIGGFASLADAFKIGEYLPTHKKFIRELKDVSEEAANLILPYIVSKPSKNTYLHFLVSQEYSEDVIVSAVLEIFGMSSDSTAAATVWALAFLVRHPDIQEKLYQEIKNVTGGNRPVQIVDVKKMPYLQAVVKETLRMKAVGPMGISHKASKNTSLMGKKIDKGTQVMVNHYAIHHNSDIFPEPYNFKPERFFKDVNSDASLGDREKMESSLLPFGAGMRVCAGTDIAKLIISFGIASLVNEFKWSCVSDGKLPDLSEDLSFILLMKNPLEARIAPRVD

SEQ ID NO: 358 - protein, 506 aa, Papaver bracteatum
MAPINIEENDFWMIACTVIIVFALVKFMFSFYQSANTTEWPEGPKTLPIIGNLHQLGGGVPLQVALANLSKVYGGAFTIWIGSWVPMIVISDIDNAREVLVNKSADYSARDVPDILKIITANGKNIADCDSGPFWHHLKKGLQSCINPSNVMSLSRLQEKDMQNLIKSMQERASQQNGILKPLDHAKEASIRLLSRVIFGQDFSNEDLVIGVKDALDEMVRISGLASLADAFKIAKYLPSQRKNIRDMYATRDRVYNLIQPHIVSNLPANSFLHFLTSQDYSDEIIYSMVLEIFGLGVDSTAATAVWALSFLVGKQEIQEKLYREINNLTGGQRPVKVADLKELPYLQAVMKETLRMKPIAPLAVPHVAVKDTTFKGRRIVKGTKVMVNLYAIHHDPNVFPAPYKFIPERFLKDVNSDGRFGDINTMESSLIPFGAGMRICGGVELAKQMVGFALASMVNEFKWDCVSEGKLPDLREAVSFILYMKNPLEAKITPRDARSYKTFGQ

SEQ ID NO: 359 - protein, 489 aa, Papaver bracteatum
MIMSNSWILTLISTILSVVFAAVLIIFRRRISASTTEWPVGPKTLPIIGNLHILGGTALHVVLHKLAEVYGSVMTIWIGSWKPVIIVSDFDRAWEVLVNKSSDYSAREMPEITKIGTANWRTISSSDSGPFWATLRKGLQSVALSPQHLASQTAHQERDIIKLIKNLKDEAALNSGTVKPLDHLKKATVRLISRLIFGQDFDDDKYVEDMHDVIEFLIRISGYAQLAEVFYYAKYLPSHKRAVTGAEEAKRRVIALVRPFLQSNPATNTYLHFLKSQHYPEEVIIFAIFEAYLLGVDSTSSTTAWALAFLIREPSVQEKLYQELKNFTANNNRTMLKVEDVNKLPYLQAVVKETMRMKPIAPLAIPHKACKDTSLMGKKVDKGTKVMVNIHALHHTEKVWKEPYKFMPERFLQKQDKAMEQSLLPFSAGMRICAGMELGKLQFSFSLANLVYAFKWSCVSDGVLPDMSDLLGFVLFMKTPLEARVVPRL

SEQ ID NO: 360 - protein, 489 aa, Podophyllum peltatum
MEMETSVLGLSSTLIIALAITVIFLLKAKSSSAIKWPPGPKTLPIIGNLHQLGGDELHIVLAKLARVHGAIMTIWMAKKPVIVVSDVNSVWEVLVSKSSDYAARDAAEISKIVSASSHSINTSDSGPYWQTLRRGLTHGPLGPLNISAQIPIQQRDMQRVIREMQQDAAANGGVIKPLDHLKRSSTRLVSRLIFGDTFDNDPYNDSMHEVVQDLNRFGGIALLEQAFSFAKYLPSYKRGVKEFHIHKRKIDDLVRPVVASSNPPSNSYLGFLQSQNYSEEIIIACIFELYLLAMDSSASTATWALAFMIRDQQVQEKLYQDIKRVIGDEVGLVKAEDLSKMHYLQAVVKETMRMKPIAPLAIPHKTAIDTSLMGTKVPKGTCVMVNLYALHHDESVWAKPYTFMPERFLQREDGKSVTEQAFLPFGAGMRICGGMEVGKLQFSLALANLVNAFKWTSAAEGKLPDMSDELQFITVMKTPLEARIVPRNP

SEQ ID NO: 361 - protein, 486 aa, Papaver somniferum
MEGIQWTLLSIFVGVLIIWKRWFTKTMELPPGPRKLPVIGNLHQLNKGGELVHVTLAKMAQQHGKIMTVWFGGKQPSIVVSHHEAAWEVLVTKASDFSSRTLPYMSKFSSADWYTLATCNLGPFWQNLRKGLQTTTLNPHTFSAQVHLQEKDISNLILDLKEEASLNGGIVKPMIPLRRTTIQLIGRFCFGAEFEDKDGFVENIDTVMEETIRLSGHARLVDVFEFTRYIPGFRLLFKEAYELKRKIEETIRPYIRRYKSSTNCFLQFLLSQEDYSEEVVIFNLFEQFLLSTDSTSNTTSWALAYLIHNEKIQEKVYEEVQELTRSGRSREEMVTIEEVSKLKYVNAAVKEVLRMKPIAPLAVPHQAVCDSNLMGMKVRKGTPVMVNIYAVHYDPTVWVEPERFMPERFLSKPDVAMERSLIVFGAGRRICAGMDLAKLQVALTLANLVNSFRWSCVSEGQLPDLSEDLSFILRMKTPLVAHIVPR

SEQ ID NO: 362 - protein, 485 aa, Papaver somniferum
MIMSNLWILTLISTILAVFAAVLIIFRRRISASTTEWPVGPKTLPIIGNLHILGGTALHVVLHKLAEVYGSVMTIWIGSWKPVIIVSDFDRAWEVLVNKSSDYSAREMPEITKIGTANWRTISSSDSGPFWATLRKGLQSVALSPQHLASQTAHQERDIIKLIKNLKDEAASGMVKPLDHLKKATVRLISRLIYGQDFDDDKYVEDMHDVIEFLIRISGYAQLAEVFYYAKYLPGHKRAVTGAEEAKRRVIALVRPFLQSNPATNTYLHFLKSQLYPEEVIIFAIFEAYLLGVDSTSSTTAWALAFLIREPSVQEKLYQELKNFTANNNRTMLKVEDVNKLPYLQAVVKETMRMKPIAPLAIPHKACKDTSLMGKKVDKGTKVMVNIHALHHTEKVWKEPYKFIPERFLQKHDKAMEQSLLPFSAGMRICAGMELGKLQFSFSLANLVNAFKWSCVSDGVLPDMSDLLGFVLFMKTPLEARIVPR

SEQ ID NO: 363 - protein, 492 aa, Papaver somniferum; identical to SEQ ID NO: 52

SEQ ID NO: 364 - protein, 505 aa, Papaver somniferum
MAPINIEGNDFWMIACTVIIVFALVKFMFSKISFYQSANTTEWPAGPKTLPIIGNLHQLGGGVPLQVALANLAKVYGGAFTIWIGSWVPMIVISDIDNAREVLVNKSADYSARDVPDILKIITANGKNIADCDSGPFWHNLKKGLQSCINPSNVMSLSRLQEKDMQNLIKSMQERASQHNGIIKPLDHAKEASMRLLSRVIFGHDFSNEDLVIGVKDALDEMVRISGLASLADAFKIAKYLPSQRKNIRDMYATRDRVYNLIQPHIVPNLPANSFLYFLTSQDYSDEIIYSMVLEIFGLGVDSTAATAVWALSFLVGEQEIQEKLYREINNRTGGQRPVKVVDLKELPYLQAVMKETLRMKPIAPLAVPHVAAKDTTFKGRRIVKGTKVMVNLYAIHHDPNVFPAPYKFMPERFLKDVNSDGRFGDINTMESSLIPFGAGMRICGGVELAKQMVAFALASMVNEFKWDCVSEGKLPDLSEAISFILYMKNPLEAKITPRTKPFRQ

SEQ ID NO: 365 - protein, 505 aa, Papaver somniferum
MAPINIEGNDFWMIACTVIIVFALVKFMFSKISFYQSANTTEWPAGPKTLPIIGNLHQLGGGVPLQVALANLAKVYGGAFTIWIGSWVPMIVISDIDNAREVLVNKSADYSARDVPDILKIITANGKNIADCDSGPFWHNLKKGLQSCINPSNVMSLSRLQEKDMQNLIKSMQERASQHNGIIKPLDHAKEASMRLLSRVIFGHDFSNEDLVIGVKDALDEMVRISGLASLADAFKIAKYLPSQRKNIRDMYATRDRVYNLIQPHIVPNLPENSFLHFLTSQDYSDEIIYSMVLEIFGLGVDSTAATAVWALSFLVGEQEIQEKLYREINNRTGGQRPVKVVDLKELPYLQAVMKETLRMKPIAPLAVPHVAAKDTTFKGRRIVKGTKVMVNLYAIHHDPNVFPAPYKFMPERFLKDVNSDGRFGDINTMESSLIPFGAGMRICGGVELAKQMVAFALASMVNEFKWDCVSEGKLPDLSEAISFILYMKNPLEAKITPRTKPFRQ

SEQ ID NO: 366 - protein, 497 aa, Papaver somniferum
MAPINIQGNDFWMIACTVIIVFALVKFMFSKISFYQSANTTEWPAGPKTLPIIGNLHQLGGGVPLQVALANLAKVYGGAFTVWIGSWVPMIIISDIDNAREVLVNKSADYSARDVPDILKIITANGKNIADCDSGPFWHNLKKGLQSCINPSNVMSLSRLQEKDMQNLIKSMQERASQHNGIIKPLDHAKEASMRLLSRVIFGQDFSNEDLVIGVKDALDEMVRISGLASLADAFKIAKYLPSQRKNIRDMYATRDRVYNLIQPHIVSNLPANSFLHFLTSQDYSDEIIYSMVLEIFGLGVDSTAATAVWALSFLVCEQEIQEKLYREINNLTGGQRPVKVVDLKELPYLQAVMKETLRMKPIAPLAVPHVAAKDTTFKGRRIVKGTKVMVNLYAIHHDPNVFPAPYKFMPERFLKDVNSDGRFGDINTMESSLIPFGAGMRICGGVELAKQMVAFALASMVNEFKWDCVSEGKLPDLSEAISFILYMKNPLEAKIT

SEQ ID NO: 367 - protein, 506 aa, Papaver somniferum
MAPINIQGNDFWMIACTVIIVFALVKFMFSKISFYQSANTTEWPVGPKTLPIIGNLHQLGGGMPLQVALANLAKVYGGAFTVWIGSWVPMIIISDIDNAREVLVNRSADYSARDVPDILKIITANGKNIADCDSGPFWHNLKKGLQSCINPSNVMSLSRLQEKDMQNLIKSMQERASQQNGIVKPLDHAKEASMRLLSRVIFGQDFSNEDLVIGVKDALDEMVRISGLASLADAFKIAKYLPSQRKNIRDMYATRDRVYNLIQPHIVSNLPANSFLHFLTSQDYSDEIIYSMVLEIFGLGVDSTAATAVWALSFLVCEQEIQEKLYREINNLTGGQRPVKVVDLKELPYLQAVMKETLRMKPIAPLAVPHVAAKDTTLKGRRIVKGTKVMVNLYAIHHDPNVFPAPYKFMPERFLKDVNSDGRFGDINTMESSLIPFSAGMRICGGVELAKQMVAFALASMVNEFKWDCVSEGKFPDLSEAISFILYMKNPLEAKITPRTKPFDSR

SEQ ID NO: 368 - protein, 505 aa, Papaver somniferum
MAPINIQGNDFWMIACTVIIVFALVKFMFSKISFYQSANTTEWPAGPKTLPIIGNLHQLGGGVPLQVALANLAKVYGGAFTVWIGSWVPMIIISDIDNAREVLVNKSADYSARDVPDILKIITANGKNIADCDSGPFWHNLKKGLQSCINPSNVMSLSRLQEKDMQNLIKSMQERASQQNGIVKPLDHAKEASMRLLSRVIFGQDFSNEDLVIGVKDALDEMVRISGLASLADAFKIAKYLPSQRKNIRDMYATRDRVYNLIQPHIVSNLPANSFLHFLTSQDYSDEIIYSMVLEIFGLGVDSTAATAVWALSFLVGEQEIQEKLYREINNRTGGQRPVKVVDLKELPYLQAVMKETLRMKPIAPLAVPHVAAKDTTFKGRRIVKGTKVMVNLYAIHHDPNVFPAPYKFMPERFLKDVNSDGRFGDINTMESSLIPFGAGMRICGGVELAKQMVAFALASMVNEFKWDCVSEGKLPDLSEAISFILYMKNPLEAKITPRTKPFRQ

SEQ ID NO: 369 - protein, 494 aa, Papaver somniferum
MDENSLIIIASTVIMVLAIAKFLALRKSYPTGTEWPAGPKTLPLIGNLHQLWGDLFHVVLANLAKVHGGVFTIWLGSWNPVIIVSDVNSAREVLLTKSSDYSSRNYPEYLTVLSEGNDSINGSDCGPFWHNLRKGLTSGALNPLNVTSQSHLQESDMQNLIRSLQENASREKGILKPLDYVKKEAIRLLNRLIFGQDFSNDEDFIVGIHHTVHHLISIGGFANLADAFKIGEYVPRHRRYIRGLNDVGEQAAKLILPHIAAKPPTNSYLHFLKSQDFSEDVIVSLILEVYGFATDSIASTIVWALTYLVREPKIQEKLYREIKDVTGGTRPVKIADLNKMSYLKAVMKETIRMKPLGPMAIAHKATKNTSLMGRKIAKDTPVMVNIYAIQHNSEVFPEPYKFIPERFLNDVNSDGSLGDIKKMESSLLAFSAGMRICAGMELGKLQLAFGLASLVNEFKWDCFAEGKLPDLSEEHCFILLMKNPLEARVTPRIH

SEQ ID NO: 370 - protein, 494 aa, Papaver somniferum
MDENSLIIIASTVIMVLAIAKFLALRKSYPTGTEWPAGPKTLPLIGNLHQLWGDLFHVVLANLAKVHGGVFTIWLGSWNPVIIVSDVNSAREVLLTKSSDYSSRNYPEYLTVLSEGNDSINGSDCGPFWHNLRKGLTSGALNPLNVTSQSHLQESDMQNLIRSLQENASREKGILKPLDYVKKEAIRLLNRLIFGQDFSNDEDFIVGIHHTVHHLISIGGFANLADAFKIGEYVPRHRRYIRGLNDVGEQAAKLILPHIAAKPPTNSYLHFLKSQDFSEDVIVSLILEVYGFATDSIASTIVWALTYLVREPKIQEKLYREIKDVTGGTRPVKIADLNKMSYLKAVMKETIRMKPLGPMAIAHKATKNTSLMGRKIAKDTPVMVNIYAIQHNSEVFPEPYKFIPERFLNDVNSDGSLGDIETMERSYLAFGAGMRLCAGMDIAKLSISFGIASLVNEFKWDCVSDGKSPDVDEDLSLILLIKNPLEARITPRVY

SEQ ID NO: 371 - protein, 506 aa, Papaver somniferum
MAPINIQGNDFWMIACTVIIVFALVKFMFSKISFYQSANTTEWPAGPKTLPIIGNLHQLGGGVPLQVALANLAKVYGGAFTVWIGSWVPMIIISDIDNAREVLVNKSADYSARDVPDILKIITANGKNIADCDSGPFWHNLKKGLQSCINPSNVMSLSRLQEKDMQNLIKSMQERASQQNGIVKPLDHAKEASMRLLSRVIFGQDFSNEDLVIGVKDALDEMVRISGLASLADAFKIAKYLPSQRKNIRDMYATRDRVYNLIQPHIVSNLPANSFLHFLTSQDYSDEIIYSMVLEIFGLGVDSTAATAVWALSFLVCEQEIQEKLYREINNLTGGQRPVKVVDLKELPYLQAVMKETLRMKPIAPLAVPHVAAKDTTLKGRRIVKGTKVMVNLYAIHHDPNVFPAPYKFMPERFLKDVNSDGRFGDINTMESSLIPFGAGMRICGGVELAKQMVAFALASMVNEFKWDCVSEGKFPDLSEAISFILYMKNPLEAKITPRTKPFDSR

SEQ ID NO: 372 - protein, 494 aa, Papaver somniferum; identical to SEQ ID NO: 370

SEQ ID NO: 373 - protein, 508 aa, Papaver somniferum; identical to SEQ ID NO: 54

SEQ ID NO: 374 - protein, 485 aa, Sanguinaria canadensis; identical to SEQ ID NO: 158

SEQ ID NO: 375 - protein, 496 aa, Sanguinaria canadensis
MEFEKIMMSNPWILAATTAVVFISITAIFFRRKSSSMEWPTGPKTLPIIGNMHLLGGTALHVVLHNFAKIYGNVMTIWIGSWRPVIVVSDIDRAWEVLVNKSSDYSARDMPEITKIISADWKTISTSDSGPFWTNLRKGLQNVALSPHNLAAQARFQERDISKMIETLKEEAALNNGIVKPLDHLKKATVRLISRLIYGQEFDNNKYVEDMHHAIEELIRVSGYARLAEAFYYAKYLPSHKKAVRDVEEANRRVKNLVRPFLSSNPPTNCYLHFLRTQNYPEEVIIFAIFEAYLLGVDSTSSTTAWALAFLVREPNVQEKLYQELKNFTTNNDRKMLKVEDINKLQYLQAVIKETMRMKPIAPLAIPHKACKETSLMGSKVDKGTRVMVNIYALHHNQKVWKEPYKFMPERFLETDNQDGNVGKAMEQSLLPFSAGMRICAGMELGKLQFTFSLANLVNAFKWSCVSDGVLPDMSDQLGFVLLMKNPLEARIVPRS

SEQ ID NO: 376 - protein, 503 aa, Sanguinaria canadensis
MEEMISLQWILTAVIVVVVVAMASKIFSNRRKSSMKWPDGPKTLPIIGNMHQLGGTAGLQVVLHKLADVYGSIMTIWIGSWRPVIVVSDIDKAWEVLVNKSSDYSARDMPEITRINTANWRTISTSDSGPFWSNLRKGLQNVALSPHNLAAQSQFQERDINRLIKNLKEEAALNDGIVKPLDHLKKATVRLLSRLIYGQNFNDDKYVETMHNEIEELIRISGYARLAEAFYYAKYLPSHKRVEKAVEEAHYRIKALISPLLSWNPPLNSYLHFLRSQNYPEEVIIFCIYEVYLLGVDSTSSTTAWALAFLVREPAVQEKLYQELNNFTHDRQMSAVKVEDVNKLPYLQAVMKETMRMKPIAPLAIPHKTCKETSLGGNKVDKGTRVMVNLHAIHHNPKVWHEPYRFLPERFLQVNKETINNGGGGGGTAKEMEQSFLPFSAGMRICAGMELGKLQFGLALANLVNAFQWSCVADGKLPDMSDLLGFVLFMKNPLEARIVPRIR

SEQ ID NO: 377 - protein, 490 aa, Stylophorum diphyllum
MEESFWLVTATVVVVFVIAKLQFRKSSSISTMEWPAGPKTLPIIGNLHQLGGAALHVVLANLAKAYGSVMTIWVGSWRPMIVISDFDKAWEVLVNKSSDYSARSLPEITRIISANWKNIMTSDSGPFWQNLRKGLQSGALSPHNVMSQYQLQERDMQNLIKTMRVEAFKNNGRIKPLDHLKQETVRLLSRLIFGQDFNDEKLVVGMHHALDDLVRISGYASLADAFKFAENLPSHKKSIREVHELKKRVENLVRPHIVSNPPTNTYLNFLQSQNFSEDLIISAILEVYDLGVDSTASTTVWALTFLVRELKVQEKLYQEIKNLTGGRSTVKVEEVSKMPYLQAVMKETMRMKPIAPMAIPHTAARETSLMGKKIDKGTVVMVNLYAIHHNPNIFPEPYKFMPERFLHGEEQNGGNIKEMEQSLLPFSAGMRICAGMELGKLQLGFALASLVNAFKWECAVDGKLPDMSEDHCFILLMKNPLEAKITPRTH

SEQ ID NO: 378 - protein, 490 aa, Stylophorum diphyllum; identical to SEQ ID NO: 170

SEQ ID NO: 379 - protein, 477 aa, Stylophorum diphyllum; identical to SEQ ID NO: 171

SEQ ID NO: 380 - protein, 502 aa, Stylophorum diphyllum
MESLIDFSNPAKMEELMSNPWIITAITLAVVIIMMTIFRRKSSSMKWPKGPKTLPIIGNMHLFGGTDLHVVLYNIAKVYGNVMTIWIGSWRPVIVISDIERAWEVLVNKSSDYSARDMPEITKLISSDWKTISTSDAGAFWTNLRKGLQNVALSPHNLASQFQFQESDIKKLIETIKEEGAVNNGIVKPLDHLKKAMVRLISRLIFGQDFDNDKYVEGMHHAIEELIRVSGYARLAEAFYYAKYLPSHKKAVRDVEEANRRVQKLVRPFLSLNPPTNTYLHFLRSQNYSEEVIIFAIFEAYLLGVDSTSSTTAWALAFLIREPNVQEKLYQELKNFTVKNGRDMLKVEDINKLPYLQATIKETMRMKPIAPLAIPHKACRDTSLMGSKIDKGTRVMVNIYALHHNEKIWKEPFKFMPERFLQTEGEVNGKAMEQSFLPFSAGMRICAGMELGKLQFNFALANLVNAFKWSCVADGVLPDMSDQLGFVLVMKTPLEARITPRC

SEQ ID NO: 381 - protein, 489 aa, Sinopodophyllum hexandrum
MEMEMSVLAMSSTLILALAMALIFLFKAKSSSAIKWPPGPKTLPIIGNLHQLGGDELHIVLAKLARVHGAIMTIWMAKKPVIVVSDVNSVWEVLVSKSSDYAARDAAEISKIVSASSHSINTSDSGPYWQTLRRGLTHGPLGPLNISAQIPIQQRDMQRVIREMQQDAAANGGIIKPLDHLKRSSTRLVSRLIFGDTFDNDPYNDSMHEVVQDLNRFGGIALLEQAFSFAKHLPSYKRGVKEFHIHKRKIDDLVRPVVASANPPSNSYLGFLQSQNYSEEIIIACIFELYLLAMDSSASTATWALAFMIRDQQVQEKLYQDIKRVIGDGVDLVKAEDLSKMHYLQAVVKETMRMKPIAPLAIPHKTAIDTTVMGTKVPKGTCVMVNLYALHHDESVWAKPYTFMPERFLQGEDGKSVTEQAFLPFGAGMRICGGMEVGKLQFSLALANLVNAFKWTSAAEGKLPDMSDELQFITVMKTPLEARIIPRNP

SEQ ID NO: 382 - protein, 492 aa, Thalictrum flavum
MELVSLWLVSATLALVVAITILIPMVTSSSSFSQMKWPTGPNKLPIIGNLHQLGGDVLHVALAKLAQVHGSVMTVWIGNWRPIIVISDIDKAWEVLVNKSSDYGARDMPEITKIASASWHTISTSDAGAFWQTVRKGLQSGAMGPLNIAAQSQFQERDMKRLIQALRDEAAQNNNIVKPLDHIKKNTVRLLTRLIFGQTFDDDKFVESMHFEIDDIIRISGYARLAEAFYYAKYLPSHKKAEREAYLVKCRVEDLVSPLLSSNPPTNSYLYFLLSQRFSEEVIIFCIFELYLLGVDSTSSTTTWALAYLIREQAIQEKLYQDTRMTLGDVDLVKIEDVSKLKYLQAVVKETMRMKPIAPLAIPHKTAKDTTLMGSKVAKGTRIMVNLYALHHNQNIWTNPYKFMPERFLQGEDGSASNKAMEQSFLPFSAGMRICAGMDLGKLQFAFALANLVNAFKWSCVEEGKFPDMSEELSFVLLMKTPLEAKITARKF

SEQ ID NO: 383 - protein, 488 aa, Thalictrum flavum
MEVNLWLVSATFATLLAITTLIRMFKSSSQMKWPSGPKTLPIIGNMHQLGGDLLHVVLAKLAKVHGGVMTIWIGSWRPIIVVTDIDKVWEVLVSKSADYAARDFPEFTNFVTASRHTISSSDLGAFWQTLRKGLQNGALGPINIAAQSQFQERDMKQMTQAMVDEAGRNNNIVKPMEHIKKNSVRLLTRLIFGETFDDDEFVDSMLYDVDDVIRIGGFARLAEAFYYAKYLPGHRKAVREANLLKLRVEKLIRPFFSSNPPKNSYLYFLLSQNIPEEVIIFCIFELYCLGVDSTSSTTTWALAYLVHEQAVQEKLYQEIRMTLGDVDQVRIEDVSKMKYLQAVVKETMRMKPIAPFAIPHMTAKDTTLMGTKVAKGTSIMVNLYALHHNPDIWTEPYKFIPERFMQGEDGSATNKAMERSFLPFGAGMRTCAGMDLGKLQFAFVLANLVNAFKWSCVEEGKLPDLSEDLAFVLLMKTPLEAKITPRKS

SEQ ID NO: 384 - protein, 492 aa, Xanthorhiza simplicissima
MEMSPTLLVCATVAIVFTITTIIRNLFSSSSFSQMKWPTGPKKLPVIGNLHQLGDDVLHVALAKLAKVHGSVMTIWIGSWRPVIVISDIDKAWEVLVNKSADYGARDMPEITKIASASWHTISTSDAGPFWQNVRKGLQSGAMGPLNVAAQNQFQERDMKRLVNAMSDEALNSKGIVKPLDHIKKNTVRLLTRLIFGQTFDDDKFIESMHYEIEDIIRISGYARLAEAFYYAKYLPSHKKAEREAFLVKCRVEKLVRPLLSSNPPSNSYLYFLLSQNFEEEVIIFCIFELYLLGVDSTSSTTTWALAYLIREQGAQEKLYQDIRMTLGDVDLVKIEDVSKLKYLQGVIKETMRMKPIAPLAIPHKTAKETTLVGTKVAKGTRIMVNLYALHHNENIWPEPYKFMPERFLEGEAKTAYNKAMEQSFLPFSAGMRICAGMDLGKLQFAFALANLVNAFKWSCVEEGKFPDMGEELSFVLLMKTPLEARIAPRNV

SEQ ID NO: 385 - DNA, 34 bp, Artificial Sequence
  Synthetic sequence
taattaagggtgcccaattcgccctatagtgagt

SEQ ID NO: 386 - DNA, 33 bp, Artificial Sequence
  Synthetic sequence
tagggcgaattgggcacccttaattaagacaac

SEQ ID NO: 387 - DNA, 31 bp, Artificial Sequence
  Synthetic sequence
cgttggtgccattgggcgaggtggcttctct

SEQ ID NO: 388 - DNA, 27 bp, Artificial Sequence
  Synthetic sequence
cctcgcccaatggcaccaacgatgttc

SEQ ID NO: 389 - DNA, 33 bp, Artificial Sequence
  Synthetic sequence
ctaaatggggtgccggtattagacctgaacaag

SEQ ID NO: 390 - DNA, 34 bp, Artificial Sequence
  Synthetic sequence
cgtctaacactaccggcaccccatttaggaccac

SEQ ID NO: 391 - DNA, 33 bp, Artificial Sequence
  Synthetic sequence
gcggccgcaaaaatggaggtgacattttggttg

SEQ ID NO: 392 - DNA, 26 bp, Artificial Sequence
  Synthetic sequence
actagtgcatggatacgaggagtaat

SEQ ID NO: 393 - DNA, 75 bp, Artificial Sequence
  Synthetic sequence
taaccctcactaaagggaacaaaagctggagctcgtttaaacggcgcgccgagactgcagcattactttgagaag

SEQ ID NO: 394 - DNA, 51 bp, Artificial Sequence
  Synthetic sequence
ttgatactgtttccattgtttttcgaaactaagttcttggtgttttaaaac

SEQ ID NO: 395 - DNA, 51 bp, Artificial Sequence
  Synthetic sequence
aaacaccaagaacttagtttcgaaaaacaatggaaacagtatcaaagatcg

SEQ ID NO: 396 - DNA, 50 bp, Artificial Sequence
  Synthetic sequence
taagcgtgacataactaattacatgatcaatatggataggcttcgatcac

SEQ ID NO: 397 - DNA, 51 bp, Artificial Sequence
  Synthetic sequence
gtgatcgaagcctatccatattgatcatgtaattagttatgtcacgcttac

SEQ ID NO: 398 - DNA, 50 bp, Artificial Sequence
  Synthetic sequence
ccaaggaacccattgtttttatgtattacttggttatggttatatatgac

SEQ ID NO: 399 - DNA, 50 bp, Artificial Sequence
  Synthetic sequence
atataaccataaccaagtaatacataaaaacaatgggttccttggatgcg

SEQ ID NO: 400 - DNA, 56 bp, Artificial Sequence
  Synthetic sequence
caaacctctggcgaagaagtccattatggaaaagcttctataacagattgtattgc

SEQ ID NO: 401 - DNA, 50 bp, Artificial Sequence
  Synthetic sequence
caatctgttatagaagcttttccataatggacttcttcgccagaggtttg

SEQ ID NO: 402 - DNA, 50 bp, Artificial Sequence
  Synthetic sequence
tttgctttcagttgcattgtttttgatttgactgtgttattttgcgtgag

SEQ ID NO: 403 - DNA, 50 bp, Artificial Sequence
  Synthetic sequence
gcaaaataacacagtcaaatcaaaaacaatgcaactgaaagcaaaggaag

SEQ ID NO: 404 - DNA, 50 bp, Artificial Sequence; identical to SEQ ID NO: 403
  Synthetic sequence

SEQ ID NO: 405 - DNA, 50 bp, Artificial Sequence
  Synthetic sequence
tctttaagaaaaagtaaaacaaatcgctcttaaatatatacctaaagaac

SEQ ID NO: 406 - DNA, 74 bp, Artificial Sequence
  Synthetic sequence
ataacttcgtataatgtatgctatacgaagttattaggtaccgcggccgcacaactcatggtgatgtgattgcc

SEQ ID NO: 407 - DNA, 75 bp, Artificial Sequence; identical to SEQ ID NO: 393
  Synthetic sequence

SEQ ID NO: 408 - DNA, 56 bp, Artificial Sequence
  Synthetic sequence
caaccaaaatgtcacctccattgtttttcgaaactaagttcttggtgttttaaaac

SEQ ID NO: 409 - DNA, 60 bp, Artificial Sequence
  Synthetic sequence
ttttaaaacaccaagaacttagtttcgaaaaacaatggaggtgacattttggttgataac

SEQ ID NO: 410 - DNA, 54 bp, Artificial Sequence
  Synthetic sequence
gtaagcgtgacataactaattacatgattaatggatacgaggagtaattttggc

SEQ ID NO: 411 - DNA, 54 bp, Artificial Sequence
  Synthetic sequence
gccaaaattactcctcgtatccattaatcatgtaattagttatgtcacgcttac

SEQ ID NO: 412 - DNA, 74 bp, Artificial Sequence
  Synthetic sequence
caatctcgcccacagcccctttctttaatcattccgacccccgccatgagacaactcatggtgatgtgattgcc

SEQ ID NO: 413 - DNA, 75 bp, Artificial Sequence
  Synthetic sequence
ctcatggcgggggtcggaatgattaaagaaaggggctgtgggcgagattggagactgcagcattactttgagaag

SEQ ID NO: 414 - DNA, 59 bp, Artificial Sequence
  Synthetic sequence
ggagattatcattaacatcacccattgtttttgatttgactgtgttattttgcgtgagg

SEQ ID NO: 415 - DNA, 59 bp, Artificial Sequence
  Synthetic sequence
aataacacagtcaaatcaaaaacaatgggtgatgttaatgataatctcctctcgtcatg

SEQ ID NO: 416 - DNA, 56 bp, Artificial Sequence
  Synthetic sequence
aaacctctggcgaagaagtccacaattccttcaacatgtaaatttcctcaaatttc

SEQ ID NO: 417 - DNA, 56 bp, Artificial Sequence
  Synthetic sequence
gaaatttgaggaaatttacatgttgaaggaattgtggacttcttcgccagaggttt

SEQ ID NO: 418 - DNA, 74 bp, Artificial Sequence
  Synthetic sequence
tggtgacctccattaggccaccatcatgtttgccacggtttattaactggacaactcatggtgatgtgattgcc

SEQ ID NO: 419 - DNA, 75 bp, Artificial Sequence
  Synthetic sequence
ccagttaataaaccgtggcaaacatgatggtggcctaatggaggtcaccagagactgcagcattactttgagaag

SEQ ID NO: 420 - DNA, 60 bp, Artificial Sequence
  Synthetic sequence
aggtagtaatcgataattccattttgataattaaatctttcttatcttcttattcttttc

SEQ ID NO: 421 - DNA, 59 bp, Artificial Sequence
  Synthetic sequence
taagaagataagaaagatttaattatcaaaatggaattatcgattactacctcaatagc

SEQ ID NO: 422 - DNA, 57 bp, Artificial Sequence
  Synthetic sequence
gttctttaggtatatatttaagagcgatttgttttaaactcttgggactatcctcgc

SEQ ID NO: 423 - DNA, 57 bp, Artificial Sequence
  Synthetic sequence
gcgaggatagtcccaagagtttaaaacaaatcgctcttaaatatatacctaaagaac

SEQ ID NO: 424 - DNA, 74 bp, Artificial Sequence; identical to SEQ ID NO: 406
  Synthetic sequence

SEQ ID NO: 425 - DNA, 75 bp, Artificial Sequence; identical to SEQ ID NO: 393
  Synthetic sequence

SEQ ID NO: 426 - DNA, 48 bp, Artificial Sequence
  Synthetic sequence
agcaagcattaaggaatccattgtttttgatttgactgtgttattttg

SEQ ID NO: 427 - DNA, 47 bp, Artificial Sequence
  Synthetic sequence
gcaaaataacacagtcaaatcaaaaacaatggattccttaatgcttg

SEQ ID NO: 428 - DNA, 50 bp, Artificial Sequence
  Synthetic sequence
tgtaagcgtgacataactaattacatgactattcgtacaacttgtaatgt

SEQ ID NO: 429 - DNA, 50 bp, Artificial Sequence
  Synthetic sequence
tcgtctacattacaagttgtacgaatagtcatgtaattagttatgtcacg

SEQ ID NO: 430 - DNA, 74 bp, Artificial Sequence; identical to SEQ ID NO: 412
  Synthetic sequence

SEQ ID NO: 431 - DNA, 75 bp, Artificial Sequence; identical to SEQ ID NO: 413
  Synthetic sequence

SEQ ID NO: 432 - DNA, 59 bp, Artificial Sequence
  Synthetic sequence
cggtctgtttgttttgattgattcggttcgcattgtttttcgaaactaagttcttggtg

SEQ ID NO: 433 - DNA, 50 bp, Artificial Sequence
  Synthetic sequence
tttaaaacaccaagaacttagtttcgaaaaacaatgcgaaccgaatcaat

SEQ ID NO: 434 - DNA, 44 bp, Artificial Sequence
  Synthetic sequence
cctctggcgaagaagtccatcatatctcgagtcgaggtttgatc

SEQ ID NO: 435 - DNA, 44 bp, Artificial Sequence
  Synthetic sequence
gatcaaacctcgactcgagatatgatggacttcttcgccagagg

SEQ ID NO: 436 - DNA, 45 bp, Artificial Sequence
  Synthetic sequence
acaactcatggtgatgtgattgccgcatgccggtagaggtgtggt

SEQ ID NO: 437 - DNA, 45 bp, Artificial Sequence
  Synthetic sequence
accacacctctaccggcatgcggcaatcacatcaccatgagttgt

SEQ ID NO: 438 - DNA, 59 bp, Artificial Sequence
  Synthetic sequence
tcatctattgaacccattgtttttatgtattacttggttatggttatatatgacaaaag

SEQ ID NO: 439 - DNA, 59 bp, Artificial Sequence
  Synthetic sequence
tatataaccataaccaagtaatacataaaaacaatgggttcaatagatgaggtcaagaa

SEQ ID NO: 440 - DNA, 57 bp, Artificial Sequence
  Synthetic sequence
gttctttaggtatatatttaagagcgatttgttctacttcttcttgaaaagcagctg

SEQ ID NO: 441 - DNA, 55 bp, Artificial Sequence
  Synthetic sequence
gcagctgcttttcaagaagaagtagaacaaatcgctcttaaatatatacctaaag

SEQ ID NO: 442 - DNA, 74 bp, Artificial Sequence; identical to SEQ ID NO: 406
  Synthetic sequence

SEQ ID NO: 443 - DNA, 75 bp, Artificial Sequence; identical to SEQ ID NO: 393
  Synthetic sequence

SEQ ID NO: 444 - DNA, 59 bp, Artificial Sequence
  Synthetic sequence
gtttgccaggttgtttgaccccattgtttttcgaaactaagttcttggtgttttaaaac

SEQ ID NO: 445 - DNA, 55 bp, Artificial Sequence
  Synthetic sequence
gttttaaaacaccaagaacttagtttcgaaaaacaatggggtcaaacaacctggc

SEQ ID NO: 446 - DNA, 54 bp, Artificial Sequence
  Synthetic sequence
gtaagcgtgacataactaattacatgattaccatacatctctcaagtatctctc

SEQ ID NO: 447 - DNA, 54 bp, Artificial Sequence
  Synthetic sequence
gagagatacttgagagatgtatggtaatcatgtaattagttatgtcacgcttac

SEQ ID NO: 448 - DNA, 74 bp, Artificial Sequence; identical to SEQ ID NO: 412
  Synthetic sequence

SEQ ID NO: 449 - DNA, 20 bp, Artificial Sequence
  Synthetic sequence
ggccctgcattaatgaatcg

SEQ ID NO: 450 - DNA, 19 bp, Artificial Sequence
  Synthetic sequence
actagtggatcatccccac

SEQ ID NO: 451 - DNA, 75 bp, Artificial Sequence
  Synthetic sequence
ccgccgcgcttaatggggcgctacagggcgcgtggggatgatccactagtgagactgcagcattactttgagaag

SEQ ID NO: 452 - DNA, 60 bp, Artificial Sequence
  Synthetic sequence
cattaacatcacccattgtttttttgataattaaatctttcttatcttcttattcttttc

SEQ ID NO: 453 - DNA, 60 bp, Artificial Sequence
  Synthetic sequence
gaagataagaaagatttaattatcaaaaaaacaatgggtgatgttaatgataatctcctc

SEQ ID NO: 454 - DNA, 58 bp, Artificial Sequence
  Synthetic sequence
ctttaggtatatatttaagagcgatttgttctacaattccttcaacatgtaaatttcc

SEQ ID NO: 455 - DNA, 58 bp, Artificial Sequence
  Synthetic sequence
ggaaatttacatgttgaaggaattgtagaacaaatcgctcttaaatatatacctaaag

SEQ ID NO: 456 - DNA, 74 bp, Artificial Sequence
  Synthetic sequence
caatacgcaaaccgcctctccccgcgcgttggccgattcattaatgcaggacaactcatggtgatgtgattgcc

SEQ ID NO: 457 - DNA, 75 bp, Artificial Sequence; identical to SEQ ID NO: 393
  Synthetic sequence

SEQ ID NO: 458 - DNA, 57 bp, Artificial Sequence
  Synthetic sequence
gccaggttgtttgaccccattgtttttatgtattacttggttatggttatatatgac

SEQ ID NO: 459 - DNA, 57 bp, Artificial Sequence
  Synthetic sequence
gtcatatataaccataaccaagtaatacataaaaacaatggggtcaaacaacctggc

SEQ ID NO: 460 - DNA, 54 bp, Artificial Sequence; identical to SEQ ID NO: 446
  Synthetic sequence

SEQ ID NO: 461 - DNA, 54 bp, Artificial Sequence; identical to SEQ ID NO: 447
  Synthetic sequence

SEQ ID NO: 462 - DNA, 74 bp, Artificial Sequence; identical to SEQ ID NO: 412
  Synthetic sequence

SEQ ID NO: 463 - DNA, 75 bp, Artificial Sequence; identical to SEQ ID NO: 413
  Synthetic sequence

SEQ ID NO: 464 - DNA, 59 bp, Artificial Sequence
  Synthetic sequence
cttgacctcatctattgaacccattgtttttcgaaactaagttcttggtgttttaaaac

SEQ ID NO: 465 - DNA, 59 bp, Artificial Sequence
  Synthetic sequence
gttttaaaacaccaagaacttagtttcgaaaaacaatgggttcaatagatgaggtcaag

SEQ ID NO: 466 - DNA, 55 bp, Artificial Sequence
  Synthetic sequence
gacttgaccaaacctctggcgaagaagtccactacttcttcttgaaaagcagctg

SEQ ID NO: 467 - DNA, 55 bp, Artificial Sequence
  Synthetic sequence
ggatggttgcgcagctgcttttcaagaagaagtagtggacttcttcgccagaggt

SEQ ID NO: 468 - DNA, 74 bp, Artificial Sequence; identical to SEQ ID NO: 406
  Synthetic sequence

SEQ ID NO: 469 - DNA, 27 bp, Artificial Sequence
  Synthetic sequence
tgtgcacaaaggccataatattatgtc

SEQ ID NO: 470 - DNA, 50 bp, Artificial Sequence
  Synthetic sequence
taatttcgataagccaggttaacctgcggcatgagttatggttgcacagt

SEQ ID NO: 471 - DNA, 50 bp, Artificial Sequence
  Synthetic sequence
ggtaactgtgcaaccataactcatgccgcaggttaacctggcttatcgaa

SEQ ID NO: 472 - DNA, 60 bp, Artificial Sequence
  Synthetic sequence
ctcaaagtaatgctgcagtctcggcgcgccggctacaattaatacataaccttatgtatc

SEQ ID NO: 473 - DNA, 60 bp, Artificial Sequence; identical to SEQ ID NO: 472
  Synthetic sequence

SEQ ID NO: 474 - DNA, 22 bp, Artificial Sequence
  Synthetic sequence
aaagctggctccccttagacaa

SEQ ID NO: 475 - DNA, 20 bp, Artificial Sequence
  Synthetic sequence
gccaggcgcctttatatcat

SEQ ID NO: 476 - DNA, 47 bp, Artificial Sequence
  Synthetic sequence
taatttcgataagccaggttaacctgctttgcgaaaccctatgctct

SEQ ID NO: 477 - DNA, 59 bp, Artificial Sequence
  Synthetic sequence
ttcaaatccgaacaacagagcatagggtttcgcaaagcaggttaacctggcttatcgaa

SEQ ID NO: 478 - DNA, 60 bp, Artificial Sequence; identical to SEQ ID NO: 472
  Synthetic sequence

SEQ ID NO: 479 - DNA, 51 bp, Artificial Sequence
  Synthetic sequence
ggcaatcacatcaccatgagttgtgcggccgcaatggaaggtcgggatgag

SEQ ID NO: 480 - DNA, 20 bp, Artificial Sequence
  Synthetic sequence
ataaagcagccgctaccaaa

SEQ ID NO: 481 - protein, 8 aa, Artificial Sequence
  Synthetic sequence
  misc_feature (2)..(3): Xaa can be any naturally occurring amino acid
  misc_feature (5)..(5): Xaa can be any naturally occurring amino acid
  misc_feature (7)..(7): Xaa can be any naturally occurring amino acid
FXXGXRXC

SEQ ID NO: 482 - DNA, 6 bp, Artificial Sequence
  Synthetic sequence
aaaaca

SEQ ID NO: 483 - protein, 510 aa, Artificial Sequence
  Synthetic sequence
  misc_feature (1)..(10): Xaa can be any naturally occurring amino acid
  misc_feature (12)..(15): Xaa can be any naturally occurring amino acid
  misc_feature (17)..(28): Xaa can be any naturally occurring amino acid
  misc_feature (30)..(36): Xaa can be any naturally occurring amino acid
  misc_feature (38)..(44): Xaa can be any naturally occurring amino acid
  misc_feature (48)..(48): Xaa can be any naturally occurring amino acid
  misc_feature (52)..(52): Xaa can be any naturally occurring amino acid
  misc_feature (55)..(55): Xaa can be any naturally occurring amino acid
  misc_feature (65)..(67): Xaa can be any naturally occurring amino acid
  misc_feature (70)..(70): Xaa can be any naturally occurring amino acid
  misc_feature (77)..(78): Xaa can be any naturally occurring amino acid
  misc_feature (80)..(80): Xaa can be any naturally occurring amino acid
  misc_feature (82)..(82): Xaa can be any naturally occurring amino acid
  misc_feature (84)..(84): Xaa can be any naturally occurring amino acid
  misc_feature (88)..(88): Xaa can be any naturally occurring amino acid
  misc_feature (90)..(90): Xaa can be any naturally occurring amino acid
  misc_feature (92)..(92): Xaa can be any naturally occurring amino acid
  misc_feature (94)..(95): Xaa can be any naturally occurring amino acid
  misc_feature (98)..(100): Xaa can be any naturally occurring amino acid
  misc_feature (104)..(104): Xaa can be any naturally occurring amino acid
  misc_feature (107)..(107): Xaa can be any naturally occurring amino acid
  misc_feature (110)..(110): Xaa can be any naturally occurring amino acid
  misc_feature (113)..(114): Xaa can be any naturally occurring amino acid
  misc_feature (116)..(117): Xaa can be any naturally occurring amino acid
  misc_feature (119)..(119): Xaa can be any naturally occurring amino acid
  misc_feature (122)..(122): Xaa can be any naturally occurring amino acid
  misc_feature (132)..(134): Xaa can be any naturally occurring amino acid
  misc_feature (136)..(136): Xaa can be any naturally occurring amino acid
  misc_feature (139)..(139): Xaa can be any naturally occurring amino acid
  misc_feature (141)..(142): Xaa can be any naturally occurring amino acid
  misc_feature (148)..(151): Xaa can be any naturally occurring amino acid
  misc_feature (153)..(153): Xaa can be any naturally occurring amino acid
  misc_feature (155)..(155): Xaa can be any naturally occurring amino acid
  misc_feature (158)..(158): Xaa can be any naturally occurring amino acid
  misc_feature (161)..(162): Xaa can be any naturally occurring amino acid
  misc_feature (166)..(166): Xaa can be any naturally occurring amino acid
  misc_feature (169)..(169): Xaa can be any naturally occurring amino acid
  misc_feature (172)..(178): Xaa can be any naturally occurring amino acid
  misc_feature (180)..(182): Xaa can be any naturally occurring amino acid
  misc_feature (185)..(186): Xaa can be any naturally occurring amino acid
  misc_feature (191)..(192): Xaa can be any naturally occurring amino acid
  misc_feature (194)..(194): Xaa can be any naturally occurring amino acid
  misc_feature (197)..(197): Xaa can be any naturally occurring amino acid
  misc_feature (206)..(206): Xaa can be any naturally occurring amino acid
  misc_feature (208)..(208): Xaa can be any naturally occurring amino acid
  misc_feature (210)..(210): Xaa can be any naturally occurring amino acid
  misc_feature (213)..(214): Xaa can be any naturally occurring amino acid
  misc_feature (216)..(216): Xaa can be any naturally occurring amino acid
  misc_feature (218)..(218): Xaa can be any naturally occurring amino acid
  misc_feature (220)..(220): Xaa can be any naturally occurring amino acid
  misc_feature (224)..(224): Xaa can be any naturally occurring amino acid
  misc_feature (227)..(227): Xaa can be any naturally occurring amino acid
  misc_feature (240)..(241): Xaa can be any naturally occurring amino acid
  misc_feature (250)..(250): Xaa can be any naturally occurring amino acid
  misc_feature (252)..(253): Xaa can be any naturally occurring amino acid
  misc_feature (256)..(259): Xaa can be any naturally occurring amino acid
  misc_feature (261)..(263): Xaa can be any naturally occurring amino acid
  misc_feature (265)..(266): Xaa can be any naturally occurring amino acid
  misc_feature (268)..(271): Xaa can be any naturally occurring amino acid
  misc_feature (280)..(280): Xaa can be any naturally occurring amino acid
  misc_feature (283)..(284): Xaa can be any naturally occurring amino acid
  misc_feature (286)..(286): Xaa can be any naturally occurring amino acid
  misc_feature (288)..(292): Xaa can be any naturally occurring amino acid
  misc_feature (294)..(296): Xaa can be any naturally occurring amino acid
  misc_feature (309)..(309): Xaa can be any naturally occurring amino acid
  misc_feature (322)..(324): Xaa can be any naturally occurring amino acid
  misc_feature (329)..(330): Xaa can be any naturally occurring amino acid
  misc_feature (333)..(336): Xaa can be any naturally occurring amino acid
  misc_feature (338)..(341): Xaa can be any naturally occurring amino acid
  misc_feature (343)..(343): Xaa can be any naturally occurring amino acid
  misc_feature (346)..(348): Xaa can be any naturally occurring amino acid
  misc_feature (350)..(351): Xaa can be any naturally occurring amino acid
  misc_feature (360)..(360): Xaa can be any naturally occurring amino acid
  misc_feature (363)..(363): Xaa can be any naturally occurring amino acid
  misc_feature (374)..(378): Xaa can be any naturally occurring amino acid
  misc_feature (380)..(380): Xaa can be any naturally occurring amino acid
  misc_feature (384)..(384): Xaa can be any naturally occurring amino acid
  misc_feature (386)..(387): Xaa can be any naturally occurring amino acid
  misc_feature (389)..(392): Xaa can be any naturally occurring amino acid
  misc_feature (404)..(406): Xaa can be any naturally occurring amino acid
  misc_feature (410)..(410): Xaa can be any naturally occurring amino acid
  misc_feature (413)..(413): Xaa can be any naturally occurring amino acid
  misc_feature (419)..(430): Xaa can be any naturally occurring amino acid
  misc_feature (432)..(432): Xaa can be any naturally occurring amino acid
  misc_feature (435)..(435): Xaa can be any naturally occurring amino acid
  misc_feature (439)..(439): Xaa can be any naturally occurring amino acid
  misc_feature (446)..(446): Xaa can be any naturally occurring amino acid
  misc_feature (457)..(460): Xaa can be any naturally occurring amino acid
  misc_feature (463)..(463): Xaa can be any naturally occurring amino acid
  misc_feature (466)..(467): Xaa can be any naturally occurring amino acid
  misc_feature (469)..(469): Xaa can be any naturally occurring amino acid
  misc_feature (471)..(471): Xaa can be any naturally occurring amino acid
  misc_feature (473)..(475): Xaa can be any naturally occurring amino acid
  misc_feature (477)..(478): Xaa can be any naturally occurring amino acid
  misc_feature (481)..(481): Xaa can be any naturally occurring amino acid
  misc_feature (483)..(486): Xaa can be any naturally occurring amino acid
  misc_feature (488)..(488): Xaa can be any naturally occurring amino acid
  misc_feature (493)..(493): Xaa can be any naturally occurring amino acid
  misc_feature (496)..(496): Xaa can be any naturally occurring amino acid
  misc_feature (498)..(498): Xaa can be any naturally occurring amino acid
  misc_feature (500)..(501): Xaa can be any naturally occurring amino acid
  misc_feature (503)..(510): Xaa can be any naturally occurring amino acid
XXXXXXXXXXMXXXXWXXXXXXXXXXXXAXXXXXXXSXXXXXXXEWPXGPKXLPXIGNLHQLGGXXXHVXLANLAKXXGXVXTXWVGXWXPXIXXSDXXXAWEXLVXKSXDYXXRXXPXITXIISANWKNIXXXDXGPXWXXLRKGLXXXXLXPXNVXSQXXLQEXDMXNLXXXXXXXAXXXNGXXKPLDXXKXETXRLLSRLIFXQXFXDEXXVXGXHXALDXLVXISGYASLADAFKXXENLPSHKKXIXXVHXXXXRXXXLXXPXXXXNPPTNTYLXFLXXQXFXXXXXIXXXLEVYDLGVDSTAXTTVWALTFLVREXXXQEKLXXEIXXXXGXXXXVXVEXXXKXXYLQAVMKEXMRXKPIAPMAIPHXXXXXTXLMGXKXXKXXXXMVNLYAIHHNPXXXPEPXKFXPERFLXXXXXXXXXXXXKXMEXSLLXFSAGMRXCAGMELGKLQXXXXLAXLVXXFXWXCXXXGXXPDXSXXXXFXLLMKXPLXAXIXXTXXXXXXXX

SEQ ID NO: 484 - protein, 490 aa, Artificial Sequence
  Synthetic sequence
  misc_feature (7)..(7): Xaa can be any naturally occurring amino acid
  misc_feature (9)..(9): Xaa can be any naturally occurring amino acid
  misc_feature (12)..(13): Xaa can be any naturally occurring amino acid
  misc_feature (18)..(18): Xaa can be any naturally occurring amino acid
  misc_feature (20)..(25): Xaa can be any naturally occurring amino acid
  misc_feature (28)..(29): Xaa can be any naturally occurring amino acid
  misc_feature (31)..(32): Xaa can be any naturally occurring amino acid
  misc_feature (40)..(40): Xaa can be any naturally occurring amino acid
  misc_feature (43)..(43): Xaa can be any naturally occurring amino acid
  misc_feature (53)..(54): Xaa can be any naturally occurring amino acid
  misc_feature (65)..(65): Xaa can be any naturally occurring amino acid
  misc_feature (68)..(68): Xaa can be any naturally occurring amino acid
  misc_feature (72)..(72): Xaa can be any naturally occurring amino acid
  misc_feature (76)..(76): Xaa can be any naturally occurring amino acid
  misc_feature (78)..(78): Xaa can be any naturally occurring amino acid
  misc_feature (86)..(86): Xaa can be any naturally occurring amino acid
  misc_feature (88)..(88): Xaa can be any naturally occurring amino acid
  misc_feature (98)..(98): Xaa can be any naturally occurring amino acid
  misc_feature (102)..(102): Xaa can be any naturally occurring amino acid
  misc_feature (104)..(104): Xaa can be any naturally occurring amino acid
  misc_feature (110)..(110): Xaa can be any naturally occurring amino acid
  misc_feature (122)..(122): Xaa can be any naturally occurring amino acid
  misc_feature (124)..(124): Xaa can be any naturally occurring amino acid
  misc_feature (127)..(127): Xaa can be any naturally occurring amino acid
  misc_feature (129)..(130): Xaa can be any naturally occurring amino acid
  misc_feature (136)..(139): Xaa can be any naturally occurring amino acid
  misc_feature (141)..(141): Xaa can be any naturally occurring amino acid
  misc_feature (143)..(143): Xaa can be any naturally occurring amino acid
  misc_feature (146)..(146): Xaa can be any naturally occurring amino acid
  misc_feature (149)..(150): Xaa can be any naturally occurring amino acid
  misc_feature (154)..(154): Xaa can be any naturally occurring amino acid
  misc_feature (157)..(157): Xaa can be any naturally occurring amino acid
  misc_feature (161)..(162): Xaa can be any naturally occurring amino acid
  misc_feature (164)..(166): Xaa can be any naturally occurring amino acid
  misc_feature (168)..(169): Xaa can be any naturally occurring amino acid
  misc_feature (173)..(173): Xaa can be any naturally occurring amino acid
  misc_feature (182)..(182): Xaa can be any naturally occurring amino acid
  misc_feature (196)..(196): Xaa can be any naturally occurring amino acid
  misc_feature (198)..(198): Xaa can be any naturally occurring amino acid
  misc_feature (201)..(202): Xaa can be any naturally occurring amino acid
  misc_feature (204)..(204): Xaa can be any naturally occurring amino acid
  misc_feature (206)..(206): Xaa can be any naturally occurring amino acid
  misc_feature (208)..(208): Xaa can be any naturally occurring amino acid
  misc_feature (228)..(229): Xaa can be any naturally occurring amino acid
  misc_feature (240)..(241): Xaa can be any naturally occurring amino acid
  misc_feature (245)..(247): Xaa can be any naturally occurring amino acid
  misc_feature (250)..(250): Xaa can be any naturally occurring amino acid
  misc_feature (256)..(256): Xaa can be any naturally occurring amino acid
  misc_feature (259)..(259): Xaa can be any naturally occurring amino acid
  misc_feature (268)..(268): Xaa can be any naturally occurring amino acid
  misc_feature (271)..(271): Xaa can be any naturally occurring amino acid
  misc_feature (274)..(274): Xaa can be any naturally occurring amino acid
  misc_feature (276)..(276): Xaa can be any naturally occurring amino acid
  misc_feature (278)..(279): Xaa can be any naturally occurring amino acid
  misc_feature (282)..(283): Xaa can be any naturally occurring amino acid
  misc_feature (297)..(297): Xaa can be any naturally occurring amino acid
  misc_feature (310)..(311): Xaa can be any naturally occurring amino acid
  misc_feature (318)..(318): Xaa can be any naturally occurring amino acid
  misc_feature (321)..(324): Xaa can be any naturally occurring amino acid
  misc_feature (326)..(326): Xaa can be any naturally occurring amino acid
  misc_feature (328)..(328): Xaa can be any naturally occurring amino acid
  misc_feature (334)..(335): Xaa can be any naturally occurring amino acid
  misc_feature (339)..(339): Xaa can be any naturally occurring amino acid
  misc_feature (362)..(362): Xaa can be any naturally occurring amino acid
  misc_feature (364)..(364): Xaa can be any naturally occurring amino acid
  misc_feature (368)..(368): Xaa can be any naturally occurring amino acid
  misc_feature (372)..(372): Xaa can be any naturally occurring amino acid
  misc_feature (377)..(377): Xaa can be any naturally occurring amino acid
  misc_feature (392)..(393): Xaa can be any naturally occurring amino acid
  misc_feature (401)..(401): Xaa can be any naturally occurring amino acid
  misc_feature (407)..(407): Xaa can be any naturally occurring amino acid
  misc_feature (409)..(413): Xaa can be any naturally occurring amino acid
  misc_feature (416)..(416): Xaa can be any naturally occurring amino acid
  misc_feature (418)..(418): Xaa can be any naturally occurring amino acid
  misc_feature (443)..(443): Xaa can be any naturally occurring amino acid
  misc_feature (455)..(455): Xaa can be any naturally occurring amino acid
  misc_feature (457)..(457): Xaa can be any naturally occurring amino acid
  misc_feature (459)..(460): Xaa can be any naturally occurring amino acid
  misc_feature (467)..(467): Xaa can be any naturally occurring amino acid
  misc_feature (482)..(482): Xaa can be any naturally occurring amino acid
  misc_feature (484)..(484): Xaa can be any naturally occurring amino acid
  misc_feature (486)..(486): Xaa can be any naturally occurring amino acid
  misc_feature (489)..(490): Xaa can be any naturally occurring amino acid
MEESFWXVXATXXVVFVXAXXXXXXSSXXSXXEWPAGPKXLPXIGNLHQLGGXXLHVVLANLAKXYGXVMTXWVGXWXPMIVISDXDXAWEVLVNKSXDYSXRXLPEITXIISANWKNIMTXDXGPXWXXLRKGLXXXXLXPXNVXSQXXLQEXDMXNLIXXMXXXAXXNNGXIKPLDHLKXETVRLLSRLIFGQXFXDEXXVXGXHXALDDLVRISGYASLADAFKXXENLPSHKKSIXXVHEXXXRVXNLVRPXIVXNPPTNTYLXFLXSQXFXEXXIIXXILEVYDLGVDSTAXTTVWALTFLVREXXVQEKLYXEIXXXXGXRXTVKVEXXSKMXYLQAVMKETMRMKPIAPMAIPHXAXRETXLMGXKIDKXTVVMVNLYAIHHNPXXFPEPYKFXPERFLXGXXXXXGNXKXMEQSLLPFSAGMRICAGMELGKLQXGFALASLVNAFXWXCXXDGKLPDXSEDHCFILLMKNPLXAXIXPRXX

SEQ ID NO: 485 - protein, 490 aa, Artificial Sequence
  Synthetic sequence
  misc_feature (9)..(9): Xaa can be any naturally occurring amino acid
  misc_feature (13)..(13): Xaa can be any naturally occurring amino acid
  misc_feature (18)..(18): Xaa can be any naturally occurring amino acid
  misc_feature (22)..(22): Xaa can be any naturally occurring amino acid
  misc_feature (65)..(65): Xaa can be any naturally occurring amino acid
  misc_feature (76)..(76): Xaa can be any naturally occurring amino acid
  misc_feature (86)..(86): Xaa can be any naturally occurring amino acid
  misc_feature (137)..(137): Xaa can be any naturally occurring amino acid
  misc_feature (168)..(168): Xaa can be any naturally occurring amino acid
  misc_feature (228)..(228): Xaa can be any naturally occurring amino acid
  misc_feature (247)..(247): Xaa can be any naturally occurring amino acid
  misc_feature (271)..(271): Xaa can be any naturally occurring amino acid
  misc_feature (310)..(310): Xaa can be any naturally occurring amino acid
  misc_feature (460)..(460): Xaa can be any naturally occurring amino acid
  misc_feature (467)..(467): Xaa can be any naturally occurring amino acid
MEESFWLVXATVXVVFVXAKLXFRKSSSISTMEWPAGPKTLPIIGNLHQLGGAALHVVLANLAKXYGSVMTIWVGXWRPMIVISDXDKAWEVLVNKSSDYSARSLPEITRIISANWKNIMTSDSGPFWQNLRKGLQXGALSPHNVMSQYQLQERDMQNLIKTMRVEAXKNNGRIKPLDHLKQETVRLLSRLIFGQDFNDEKLVVGMHHALDDLVRISGYASLADAFKXAENLPSHKKSIREVHELKXRVENLVRPHIVSNPPTNTYLNFLXSQNFSEDLIISAILEVYDLGVDSTASTTVWALTFLVREXKVQEKLYQEIKNLTGGRSTVKVEEVSKMPYLQAVMKETMRMKPIAPMAIPHTAARETSLMGKKIDKGTVVMVNLYAIHHNPNIFPEPYKFMPERFLHGEEQNGGNIKEMEQSLLPFSAGMRICAGMELGKLQLGFALASLVNAFKWECAXDGKLPDXSEDHCFILLMKNPLEAKITPRTH

SEQ ID NO: 486 - protein, 536 aa, Artificial Sequence
  Synthetic sequence
  misc_feature (1)..(64): Xaa can be any naturally occurring amino acid
  misc_feature (67)..(68): Xaa can be any naturally occurring amino acid
  misc_feature (70)..(71): Xaa can be any naturally occurring amino acid
  misc_feature (74)..(74): Xaa can be any naturally occurring amino acid
  misc_feature (78)..(88): Xaa can be any naturally occurring amino acid
  misc_feature (90)..(90): Xaa can be any naturally occurring amino acid
  misc_feature (92)..(98): Xaa can be any naturally occurring amino acid
  misc_feature (100)..(101): Xaa can be any naturally occurring amino acid
  misc_feature (104)..(104): Xaa can be any naturally occurring amino acid
  misc_feature (106)..(106): Xaa can be any naturally occurring amino acid
  misc_feature (108)..(108): Xaa can be any naturally occurring amino acid
  misc_feature (110)..(110): Xaa can be any naturally occurring amino acid
  misc_feature (112)..(112): Xaa can be any naturally occurring amino acid
  misc_feature (114)..(115): Xaa can be any naturally occurring amino acid
  misc_feature (118)..(120): Xaa can be any naturally occurring amino acid
  misc_feature (130)..(130): Xaa can be any naturally occurring amino acid
  misc_feature (133)..(134): Xaa can be any naturally occurring amino acid
  misc_feature (136)..(137): Xaa can be any naturally occurring amino acid
  misc_feature (139)..(139): Xaa can be any naturally occurring amino acid
  misc_feature (141)..(149): Xaa can be any naturally occurring amino acid
  misc_feature (152)..(156): Xaa can be any naturally occurring amino acid
  misc_feature (158)..(159): Xaa can be any naturally occurring amino acid
  misc_feature (161)..(163): Xaa can be any naturally occurring amino acid
  misc_feature (169)..(173): Xaa can be any naturally occurring amino acid
  misc_feature (175)..(175): Xaa can be any naturally occurring amino acid
  misc_feature (177)..(179): Xaa can be any naturally occurring amino acid
  misc_feature (181)..(183): Xaa can be any naturally occurring amino acid
  misc_feature (186)..(186): Xaa can be any naturally occurring amino acid
  misc_feature (188)..(204): Xaa can be any naturally occurring amino acid
  misc_feature (207)..(207): Xaa can be any naturally occurring amino acid
  misc_feature (210)..(210): Xaa can be any naturally occurring amino acid
  misc_feature (212)..(212): Xaa can be any naturally occurring amino acid
  misc_feature (215)..(218): Xaa can be any naturally occurring amino acid
  misc_feature (220)..(221): Xaa can be any naturally occurring amino acid
  misc_feature (223)..(225): Xaa can be any naturally occurring amino acid
  misc_feature (227)..(228): Xaa can be any naturally occurring amino acid
  misc_feature (230)..(238): Xaa can be any naturally occurring amino acid
  misc_feature (240)..(245): Xaa can be any naturally occurring amino acid
  misc_feature (248)..(248): Xaa can be any naturally occurring amino acid
  misc_feature (253)..(253): Xaa can be any naturally occurring amino acid
  misc_feature (256)..(256): Xaa can be any naturally occurring amino acid
  misc_feature (259)..(259): Xaa can be any naturally occurring amino acid
  misc_feature (262)..(262): Xaa can be any naturally occurring amino acid
  misc_feature (266)..(280): Xaa can be any naturally occurring amino acid
  misc_feature (282)..(286): Xaa can be any naturally occurring amino acid
  misc_feature (288)..(288): Xaa can be any naturally occurring amino acid
  misc_feature (290)..(293): Xaa can be any naturally occurring amino acid
  misc_feature (295)..(295): Xaa can be any naturally occurring amino acid
  misc_feature (297)..(297): Xaa can be any naturally occurring amino acid
  misc_feature (300)..(300): Xaa can be any naturally occurring amino acid
  misc_feature (303)..(304): Xaa can be any naturally occurring amino acid
  misc_feature (306)..(309): Xaa can be any naturally occurring amino acid
  misc_feature (311)..(311): Xaa can be any naturally occurring amino acid
  misc_feature (313)..(313): Xaa can be any naturally occurring amino acid
  misc_feature (315)..(315): Xaa can be any naturally occurring amino acid
  misc_feature (317)..(317): Xaa can be any naturally occurring amino acid
  misc_feature (319)..(319): Xaa can be any naturally occurring amino acid
  misc_feature (329)..(329): Xaa can be any naturally occurring amino acid
  misc_feature (332)..(332): Xaa can be any naturally occurring amino acid
  misc_feature (336)..(337): Xaa can be any naturally occurring amino acid
  misc_feature (339)..(340): Xaa can be any naturally occurring amino acid
  misc_feature (342)..(344): Xaa can be any naturally occurring amino acid
  misc_feature (347)..(347): Xaa can be any naturally occurring amino acid
  misc_feature (350)..(366): Xaa can be any naturally occurring amino acid
  misc_feature (368)..(369): Xaa can be any naturally occurring amino acid
  misc_feature (371)..(372): Xaa can be any naturally occurring amino acid
  misc_feature (374)..(375): Xaa can be any naturally occurring amino acid
  misc_feature (379)..(381): Xaa can be any naturally occurring amino acid
  misc_feature (387)..(387): Xaa can be any naturally occurring amino acid
  misc_feature (398)..(402): Xaa can be any naturally occurring amino acid
  misc_feature (404)..(404): Xaa can be any naturally occurring amino acid
  misc_feature (406)..(406): Xaa can be any naturally occurring amino acid
  misc_feature (408)..(408): Xaa can be any naturally occurring amino acid
  misc_feature (410)..(413): Xaa can be any naturally occurring amino acid
  misc_feature (415)..(416): Xaa can be any naturally occurring amino acid
  misc_feature (420)..(421): Xaa can be any naturally occurring amino acid
  misc_feature (423)..(423): Xaa can be any naturally occurring amino acid
  misc_feature (425)..(432): Xaa can be any naturally occurring amino acid
  misc_feature (434)..(435): Xaa can be any naturally occurring amino acid
  misc_feature (437)..(437): Xaa can be any naturally occurring amino acid
  misc_feature (442)..(455): Xaa can be any naturally occurring amino acid
  misc_feature (457)..(462): Xaa can be any naturally occurring amino acid
  misc_feature (471)..(471): Xaa can be any naturally occurring amino acid
  misc_feature (473)..(473): Xaa can be any naturally occurring amino acid
  misc_feature (476)..(477): Xaa can be any naturally occurring amino acid
  misc_feature (481)..(481): Xaa can be any naturally occurring amino acid
  misc_feature (483)..(485): Xaa can be any naturally occurring amino acid
  misc_feature (490)..(492): Xaa can be any naturally occurring amino acid
  misc_feature (494)..(494): Xaa can be any naturally occurring amino acid
  misc_feature (496)..(500): Xaa can be any naturally occurring amino acid
  misc_feature (502)..(503): Xaa can be any naturally occurring amino acid
  misc_feature (507)..(509): Xaa can be any naturally occurring amino acid
  misc_feature (511)..(511): Xaa can be any naturally occurring amino acid
  misc_feature (515)..(515): Xaa can be any naturally occurring amino acid
  misc_feature (518)..(518): Xaa can be any naturally occurring amino acid
  misc_feature (521)..(521): Xaa can be any naturally occurring amino acid
  misc_feature (523)..(523): Xaa can be any naturally occurring amino acid
  misc_feature (525)..(526): Xaa can be any naturally occurring amino acid
  misc_feature (528)..(536): Xaa can be any naturally occurring amino acid
XXXXXXXXXXXXXXXXXXXXXXXXXXXXXXXXXXXXXXXXXXXXXXXXXXXXXXXXXXXXXXXXWPXXPXXLPXIGNXXXXXXXXXXXVXLXXXXXXXGXXMTXWXGXWXPXIXXSDXXXAWEVLVNKSXDYXXRXXPXIXXXXXXXXXTIXXXXXGXXWXXXRKGLQXXXXXPXNXXXQXXXQEXDXXXXXXXXXXXXXXXXXIVXPLXHXKKXXXXLXXRXXXGXXFXXXXXXXXXHXXXXXXIRXSGYAXLAXAFXYAXYLPXXXXXXXXXXXXXXXVXXXXXPXLXXXXPXNXYLXFLXXQXXXXEXIXFXIXEXYLLGVDSTSXTTXWALXXLXXEXXXQEXLYXXXXXXXXXXXXXXXXXKXXDXXKXXYLQXXXKETMRXKPIAPLAIPHXXXXXTXLXGXKXXXXTXXMVNXXAXHXXXXXXXXPXXFXPERFXXXXXXXXXXXXXXKXXXXXXLPFSAGMRXCXGMXXGKLXFXXXLANLXXXFXWXXXXXGXXPDMXXXLXFVLXMKXPLXAXIXXRXXXXXXXXX

SEQ ID NO: 487 - protein, 529 aa, Artificial Sequence
  Synthetic sequence
  misc_feature (1)..(64): Xaa can be any naturally occurring amino acid
  misc_feature (67)..(67): Xaa can be any naturally occurring amino acid
  misc_feature (70)..(71): Xaa can be any naturally occurring amino acid
  misc_feature (74)..(74): Xaa can be any naturally occurring amino acid
  misc_feature (78)..(81): Xaa can be any naturally occurring amino acid
  misc_feature (83)..(85): Xaa can be any naturally occurring amino acid
  misc_feature (87)..(87): Xaa can be any naturally occurring amino acid
  misc_feature (89)..(89): Xaa can be any naturally occurring amino acid
  misc_feature (91)..(94): Xaa can be any naturally occurring amino acid
  misc_feature (96)..(97): Xaa can be any naturally occurring amino acid
  misc_feature (99)..(99): Xaa can be any naturally occurring amino acid
  misc_feature (103)..(103): Xaa can be any naturally occurring amino acid
  misc_feature (105)..(105): Xaa can be any naturally occurring amino acid
  misc_feature (109)..(109): Xaa can be any naturally occurring amino acid
  misc_feature (111)..(111): Xaa can be any naturally occurring amino acid
  misc_feature (114)..(114): Xaa can be any naturally occurring amino acid
  misc_feature (118)..(119): Xaa can be any naturally occurring amino acid
  misc_feature (129)..(129): Xaa can be any naturally occurring amino acid
  misc_feature (132)..(133): Xaa can be any naturally occurring amino acid
  misc_feature (135)..(135): Xaa can be any naturally occurring amino acid
  misc_feature (141)..(148): Xaa can be any naturally occurring amino acid
  misc_feature (152)..(152): Xaa can be any naturally occurring amino acid
  misc_feature (155)..(155): Xaa can be any naturally occurring amino acid
  misc_feature (157)..(158): Xaa can be any naturally occurring amino acid
  misc_feature (160)..(160): Xaa can be any naturally occurring amino acid
  misc_feature (162)..(162): Xaa can be any naturally occurring amino acid
  misc_feature (168)..(169): Xaa can be any naturally occurring amino acid
  misc_feature (171)..(172): Xaa can be any naturally occurring amino acid
  misc_feature (174)..(174): Xaa can be any naturally occurring amino acid
  misc_feature (176)..(178): Xaa can be any naturally occurring amino acid
  misc_feature (180)..(182): Xaa can be any naturally occurring amino acid
  misc_feature (185)..(185): Xaa can be any naturally occurring amino acid
  misc_feature (187)..(190): Xaa can be any naturally occurring amino acid
  misc_feature (192)..(196): Xaa can be any naturally occurring amino acid
  misc_feature (198)..(200): Xaa can be any naturally occurring amino acid
  misc_feature (206)..(206): Xaa can be any naturally occurring amino acid
  misc_feature (211)..(211): Xaa can be any naturally occurring amino acid
  misc_feature (214)..(216): Xaa can be any naturally occurring amino acid
  misc_feature (219)..(220): Xaa can be any naturally occurring amino acid
  misc_feature (223)..(224): Xaa can be any naturally occurring amino acid
  misc_feature (227)..(227): Xaa can be any naturally occurring amino acid
  misc_feature (230)..(234): Xaa can be any naturally occurring amino acid
  misc_feature (236)..(236): Xaa can be any naturally occurring amino acid
  misc_feature (239)..(241): Xaa can be any naturally occurring amino acid
  misc_feature (243)..(244): Xaa can be any naturally occurring amino acid
  misc_feature (247)..(247): Xaa can be any naturally occurring amino acid
  misc_feature (255)..(255): Xaa can be any naturally occurring amino acid
  misc_feature (266)..(266): Xaa can be any naturally occurring amino acid
  misc_feature (268)..(268): Xaa can be any naturally occurring amino acid
  misc_feature (270)..(278): Xaa can be any naturally occurring amino acid
  misc_feature (281)..(283): Xaa can be any naturally occurring amino acid
  misc_feature (285)..(285): Xaa can be any naturally occurring amino acid
  misc_feature (287)..(287): Xaa can be any naturally occurring amino acid
  misc_feature (290)..(292): Xaa can be any naturally occurring amino acid
  misc_feature (294)..(294): Xaa can be any naturally occurring amino acid
  misc_feature (296)..(296): Xaa can be any naturally occurring amino acid
  misc_feature (299)..(299): Xaa can be any naturally occurring amino acid
  misc_feature (302)..(303): Xaa can be any naturally occurring amino acid
  misc_feature (305)..(308): Xaa can be any naturally occurring amino acid
  misc_feature (310)..(310): Xaa can be any naturally occurring amino acid
  misc_feature (314)..(314): Xaa can be any naturally occurring amino acid
  misc_feature (318)..(318): Xaa can be any naturally occurring amino acid
  misc_feature (331)..(331): Xaa can be any naturally occurring amino acid
  misc_feature (335)..(336): Xaa can be any naturally occurring amino acid
  misc_feature (338)..(338): Xaa can be any naturally occurring amino acid
  misc_feature (341)..(343): Xaa can be any naturally occurring amino acid
  misc_feature (346)..(346): Xaa can be any naturally occurring amino acid
  misc_feature (349)..(363): Xaa can be any naturally occurring amino acid
  misc_feature (365)..(365): Xaa can be any naturally occurring amino acid
  misc_feature (368)..(368): Xaa can be any naturally occurring amino acid
  misc_feature (372)..(372): Xaa can be any naturally occurring amino acid
  misc_feature (376)..(378): Xaa can be any naturally occurring amino acid
  misc_feature (396)..(399): Xaa can be any naturally occurring amino acid
  misc_feature (401)..(401): Xaa can be any naturally occurring amino acid
  misc_feature (403)..(403): Xaa can be any naturally occurring amino acid
  misc_feature (405)..(405): Xaa can be any naturally occurring amino acid
  misc_feature (407)..(409): Xaa can be any naturally occurring amino acid
  misc_feature (412)..(413): Xaa can be any naturally occurring amino acid
  misc_feature (417)..(417): Xaa can be any naturally occurring amino acid
  misc_feature (420)..(420): Xaa can be any naturally occurring amino acid
  misc_feature (424)..(426): Xaa can be any naturally occurring amino acid
  misc_feature (428)..(429): Xaa can be any naturally occurring amino acid
  misc_feature (431)..(431): Xaa can be any naturally occurring amino acid
  misc_feature (434)..(434): Xaa can be any naturally occurring amino acid
  misc_feature (440)..(449): Xaa can be any naturally occurring amino acid
  misc_feature (451)..(451): Xaa can be any naturally occurring amino acid
  misc_feature (453)..(453): Xaa can be any naturally occurring amino acid
  misc_feature (456)..(456): Xaa can be any naturally occurring amino acid
  misc_feature (465)..(465): Xaa can be any naturally occurring amino acid
  misc_feature (470)..(470): Xaa can be any naturally occurring amino acid
  misc_feature (477)..(477): Xaa can be any naturally occurring amino acid
  misc_feature (479)..(479): Xaa can be any naturally occurring amino acid
  misc_feature (484)..(484): Xaa can be any naturally occurring amino acid
  misc_feature (486)..(486): Xaa can be any naturally occurring amino acid
  misc_feature (488)..(488): Xaa can be any naturally occurring amino acid
  misc_feature (490)..(490): Xaa can be any naturally occurring amino acid
  misc_feature (492)..(494): Xaa can be any naturally occurring amino acid
  misc_feature (496)..(497): Xaa can be any naturally occurring amino acid
  misc_feature (501)..(503): Xaa can be any naturally occurring amino acid
  misc_feature (505)..(505): Xaa can be any naturally occurring amino acid
  misc_feature (509)..(509): Xaa can be any naturally occurring amino acid
  misc_feature (512)..(512): Xaa can be any naturally occurring amino acid
  misc_feature (515)..(515): Xaa can be any naturally occurring amino acid
  misc_feature (517)..(517): Xaa can be any naturally occurring amino acid
  misc_feature (519)..(520): Xaa can be any naturally occurring amino acid
  misc_feature (522)..(529): Xaa can be any naturally occurring amino acid
XXXXXXXXXXXXXXXXXXXXXXXXXXXXXXXXXXXXXXXXXXXXXXXXXXXXXXXXXXXXXXXXWPXGPXXLPXIGNXXXXGXXXLXVXLXXXXKXXGXVMTXWXGSWXPXIVXSDIXXAWEVLVNKSXDYXXRXMPEITXXXXXXXXTISXSDXGXXWXNXRKGLQXXAXXPXNXXXQXXXQEXDXXXXIXXXXXEXXXNNGIVXPLDHXKKXXXRLXXRLXXGQXFDXXXXXEXMHXXXEXXIRXSGYARLAXAFYYAKYLPSXKXAXXXXXXXXXRVXXXVXPXLSXXXPXNXYLXFLXXQXXXXEXIIFXIFEXYLLGVDSTSSTTXWALXXLXREXXXQEXLYXXXXXXXXXXXXXXXKXEDXNKLXYLQXXXKETMRMKPIAPLAIPHKXXXXTXLXGXKXXXGTXXMVNXYAXHHNXXXWXXPXKFXPERFLXXXXXXXXXXKXMXQSXLPFSAGMRXCAGMXLGKLQFXFXLANLXNXFXWXCXXXGXXPDMXXXLXFVLXMKXPLXAXIXXRXXXXXXXX

SEQ ID NO: 488 - DNA, 75 bp, Artificial Sequence; identical to SEQ ID NO: 393
  Synthetic sequence

SEQ ID NO: 489 - DNA, 59 bp, Artificial Sequence
  Synthetic sequence
gaaaatttcgccattggtagccattgtttttcgaaactaagttcttggtgttttaaaac

SEQ ID NO: 490 - DNA, 59 bp, Artificial Sequence
  Synthetic sequence
gttttaaaacaccaagaacttagtttcgaaaaacaatggctaccaatggcgaaattttc

SEQ ID NO: 491 - DNA, 54 bp, Artificial Sequence
  Synthetic sequence
gtaagcgtgacataactaattacatgatcatttgtgaaactcaatgacatgaag

SEQ ID NO: 492 - DNA, 54 bp, Artificial Sequence
  Synthetic sequence
cttcatgtcattgagtttcacaaatgatcatgtaattagttatgtcacgcttac

SEQ ID NO: 493 - DNA, 74 bp, Artificial Sequence; identical to SEQ ID NO: 412
  Synthetic sequence

SEQ ID NO: 494 - DNA, 75 bp, Artificial Sequence; identical to SEQ ID NO: 413
  Synthetic sequence

SEQ ID NO: 495 - DNA, 59 bp, Artificial Sequence
  Synthetic sequence
gttactcatgatcattgtttttttgataattaaatctttcttatcttcttattcttttc

SEQ ID NO: 496 - DNA, 59 bp, Artificial Sequence
  Synthetic sequence
gataagaaagatttaattatcaaaaaaacaatgatcatgagtaacttatggattcttac

SEQ ID NO: 497 - DNA, 57 bp, Artificial Sequence
  Synthetic sequence
gttctttaggtatatatttaagagcgatttgttctacaaacgaggaactatacgtgc

SEQ ID NO: 498 - DNA, 58 bp, Artificial Sequence
  Synthetic sequence
cgaagcacgtatagttcctcgtttgtagaacaaatcgctcttaaatatatacctaaag

SEQ ID NO: 499 - DNA, 74 bp, Artificial Sequence; identical to SEQ ID NO: 406
  Synthetic sequence

SEQ ID NO: 500 - DNA, 75 bp, Artificial Sequence; identical to SEQ ID NO: 393
  Synthetic sequence

SEQ ID NO: 501 - DNA, 56 bp, Artificial Sequence; identical to SEQ ID NO: 408
  Synthetic sequence

SEQ ID NO: 502 - DNA, 60 bp, Artificial Sequence; identical to SEQ ID NO: 409
  Synthetic sequence

SEQ ID NO: 503 - DNA, 54 bp, Artificial Sequence; identical to SEQ ID NO: 410
  Synthetic sequence

SEQ ID NO: 504 - DNA, 54 bp, Artificial Sequence; identical to SEQ ID NO: 411
  Synthetic sequence

SEQ ID NO: 505 - DNA, 74 bp, Artificial Sequence; identical to SEQ ID NO: 406
  Synthetic sequence

SEQ ID NO: 506 - DNA, 75 bp, Artificial Sequence; identical to SEQ ID NO: 393
  Synthetic sequence

SEQ ID NO: 507 - DNA, 27 bp, Artificial Sequence
  Synthetic sequence
cgtcaaaatcttgtccgaaaatcaatc

SEQ ID NO: 508 - DNA, 56 bp, Artificial Sequence
  Synthetic sequence
gaagataagaaagatttaattatcaaaaaaacaatggaattatcgattactacctc

SEQ ID NO: 509 - DNA, 59 bp, Artificial Sequence
  Synthetic sequence
gcgatttgttctaagcgtaatctggaacatcgtatgggtaaactcttgggactatcctc

SEQ ID NO: 510 - DNA, 54 bp, Artificial Sequence
  Synthetic sequence
tacccatacgatgttccagattacgcttagaacaaatcgctcttaaatatatac

SEQ ID NO: 511 - DNA, 74 bp, Artificial Sequence; identical to SEQ ID NO: 406
  Synthetic sequence

SEQ ID NO: 512 - DNA, 22 bp, Artificial Sequence
  Synthetic sequence
ttcgtgaaacacgtgggatacc

SEQ ID NO: 513 - DNA, 59 bp, Artificial Sequence
  Synthetic sequence
tcgtattaatttcgataagccaggttaacctgctccgttaattcgggtttcaatcactt

SEQ ID NO: 514 - DNA, 59 bp, Artificial Sequence; identical to SEQ ID NO: 477
  Synthetic sequence

SEQ ID NO: 515 - DNA, 60 bp, Artificial Sequence; identical to SEQ ID NO: 472
  Synthetic sequence

SEQ ID NO: 516 - DNA, 54 bp, Artificial Sequence
  Synthetic sequence
ggcaatcacatcaccatgagttgtgcggccgctgcctacgcaacactttagctg

SEQ ID NO: 517 - DNA, 26 bp, Artificial Sequence
  Synthetic sequence
ttgttgggattccattgtgattaagg

SEQ ID NO: 518 - DNA, 62 bp, Artificial Sequence
  Synthetic sequence
cacatggcatggatgagctctacaaataagctcttcttaatcatgtaattagttatgtcacg

SEQ ID NO: 519 - DNA, 55 bp, Artificial Sequence
  Synthetic sequence
cacatggcatggatgagctctacaaataagctcttcttaatggacttcttcgcca

SEQ ID NO: 520 - DNA, 64 bp, Artificial Sequence
  Synthetic sequence
cacatggcatggatgagctctacaaataagctcttcttaaaacaaatcgctcttaaatatatac

SEQ ID NO: 521 - DNA, 62 bp, Artificial Sequence
  Synthetic sequence
cacatggcatggatgagctctacaaataagctcttcttaaacatagtgtttaaagattacgg

SEQ ID NO: 522 - DNA, 59 bp, Artificial Sequence
  Synthetic sequence
gaaaagttcttctcctttactcattgtttgctcttctgtttcgaaactaagttcttggt

SEQ ID NO: 523 - DNA, 66 bp, Artificial Sequence
  Synthetic sequence
gaaaagttcttctcctttactcattgtttgctcttctgttattaaaacttagattagattgctatg

SEQ ID NO: 524 - DNA, 61 bp, Artificial Sequence
  Synthetic sequence
gaaaagttcttctcctttactcattgtttgctcttctgtttgatttgactgtgttattttg

SEQ ID NO: 525 - DNA, 62 bp, Artificial Sequence
  Synthetic sequence
tgctgggattacacatggcatggatgaactatacaaataatcatgtaattagttatgtcacg

SEQ ID NO: 526 - DNA, 55 bp, Artificial Sequence
  Synthetic sequence
tgctgggattacacatggcatggatgaactatacaaataatggacttcttcgcca

SEQ ID NO: 527 - DNA, 64 bp, Artificial Sequence
  Synthetic sequence
tgctgggattacacatggcatggatgaactatacaaataaaacaaatcgctcttaaatatatac

SEQ ID NO: 528 - DNA, 62 bp, Artificial Sequence
  Synthetic sequence
tgctgggattacacatggcatggatgaactatacaaataaacatagtgtttaaagattacgg

SEQ ID NO: 529 - DNA, 23 bp, Artificial Sequence
  Synthetic sequence
ttatttgtatagttcatccatgc

SEQ ID NO: 530 - DNA, 53 bp, Artificial Sequence
  Synthetic sequence
tgctgggattacacatggcatggatgaactatacaaataaggatccgctggct

SEQ ID NO: 531 - DNA, 69 bp, Artificial Sequence
  Synthetic sequence
ttaattatttctcttccttttataataaattttctaggctcttcatgttttcgaaactaagttcttggt

SEQ ID NO: 532 - DNA, 76 bp, Artificial Sequence
  Synthetic sequence
ttaattatttctcttccttttataataaattttctaggctcttcatgtttattaaaacttagattagattgctatg

SEQ ID NO: 533 - DNA, 78 bp, Artificial Sequence
  Synthetic sequence
ttaattatttctcttccttttataataaattttctaggctcttcatgttttatgtattacttggttatggttatatat

SEQ ID NO: 534 - DNA, 76 bp, Artificial Sequence
  Synthetic sequence
ttaattatttctcttccttttataataaattttctaggctcttcatgttttttgataattaaatctttcttatctt

SEQ ID NO: 535 - DNA, 70 bp, Artificial Sequence
  Synthetic sequence
agcctagaaaatttattataaaaggaagagaaataattaaacagctcttctggcgccgctggctccgctg

SEQ ID NO: 536 - DNA, 31 bp, Artificial Sequence
  Synthetic sequence
ttaggcgccttatttgtatagttcatccatg

SEQ ID NO: 537 - DNA, 60 bp, Artificial Sequence
  Synthetic sequence
cacatggcatggatgaactatacaaataaggcgcctaatcatgtaattagttatgtcacg

SEQ ID NO: 538 - DNA, 53 bp, Artificial Sequence
  Synthetic sequence
cacatggcatggatgaactatacaaataaggcgcctaatggacttcttcgcca

SEQ ID NO: 539 - DNA, 62 bp, Artificial Sequence
  Synthetic sequence
cacatggcatggatgaactatacaaataaggcgcctaaaacaaatcgctcttaaatatatac

SEQ ID NO: 540 - DNA, 73 bp, Artificial Sequence
  Synthetic sequence
cacatggcatggatgaactatacaaataaggcgcctaagattaatataattatataaaaatattatcttcttt

SEQ ID NO: 541 - DNA, 65 bp, Artificial Sequence
  Synthetic sequence
tgacctagactggctttgatctttaattacacacttatcccagctgaagcttcgtacgctgcagg

SEQ ID NO: 542 - DNA, 62 bp, Artificial Sequence
  Synthetic sequence
ggataagtgtgtaattaaagatcaaagccagtctaggtcatatgcgtcgagttcaagagaaa

SEQ ID NO: 543 - DNA, 61 bp, Artificial Sequence
  Synthetic sequence
ggataagtgtgtaattaaagatcaaagccagtctaggtcatatgtcgactacgtcgtaagg

SEQ ID NO: 544 - DNA, 72 bp, Artificial Sequence
  Synthetic sequence
ggataagtgtgtaattaaagatcaaagccagtctaggtcatatgggtaataactgatataattaaattgaag

SEQ ID NO: 545 - DNA, 62 bp, Artificial Sequence
  Synthetic sequence
tgacctagactggctttgatctttaattacacacttatcctcgacaacccttaatataactt

SEQ ID NO: 546 - DNA, 58 bp, Artificial Sequence
  Synthetic sequence
ctgttgcctgacgtgagtggtgcctttgatgatgagataccgttttaagagcttggtg

SEQ ID NO: 547 - DNA, 63 bp, Artificial Sequence
  Synthetic sequence
ctgttgcctgacgtgagtggtgcctttgatgatgagataccgaggagaacttctagtatatcc

SEQ ID NO: 548 - DNA, 54 bp, Artificial Sequence
  Synthetic sequence
gtatctcatcatcaaaggcaccactcacgtcaggcaacagggacggatcgcttg

SEQ ID NO: 549 - DNA, 63 bp, Artificial Sequence
  Synthetic sequence
gtatctcatcatcaaaggcaccactcacgtcaggcaacagatactccgtctactgtacgatac

SEQ ID NO: 550 - DNA, 64 bp, Artificial Sequence
  Synthetic sequence
ctgttgcctgacgtgagtggtgcctttgatgatgagatacattcatcattttttttttattctt

SEQ ID NO: 551 - DNA, 57 bp, Artificial Sequence
  Synthetic sequence
ctgacgtcggtaaagtaggagtgtctgcaataggtcttaaggtccttttcatcacgt

SEQ ID NO: 552 - DNA, 65 bp, Artificial Sequence
  Synthetic sequence
ctgacgtcggtaaagtaggagtgtctgcaataggtcttaagtgctatatccctatataacctacc

SEQ ID NO: 553 - DNA, 56 bp, Artificial Sequence
  Synthetic sequence
ttaagacctattgcagacactcctactttaccgacgtcagcaggtggcacttttcg

SEQ ID NO: 554 - DNA, 63 bp, Artificial Sequence
  Synthetic sequence
gcatttttattatataagttgttttattcagagtattcctggcgcgcccgcgttgctggcgtt

SEQ ID NO: 555 - DNA, 55 bp, Artificial Sequence
  Synthetic sequence
cctctttatattacatcaaaataagaaaataattataacacagatccgcggccgc

SEQ ID NO: 556 - DNA, 11396 bp, Artificial Sequence
  Synthetic sequence
aaaagctggagctcgtttaaacggcgcgccgagactgcagcattactttgagaagtcgagtttatcattatcaatactgccatttcaaagaatacgtaaataattaatagtagtgattttcctaactttatttagtcaaaaaattagccttttaattctgctgtaacccgtacatgcccaaaatagggggcgggttacacagaatatataacatcgtaggtgtctgggtgaacagtttattcctggcatccactaaatataatggagcccgctttttaagctggcatccagaaaaaaaaagaatcccagcaccaaaatattgttttcttcaccaaccatcagttcataggtccattctcttagcgcaactacagagaacaggggcacaaacaggcaaaaaacgggcacaacctcaatggagtgatgcaacctgcctggagtaaatgatgacacaaggcaattgacccacgcatgtatctatctcattttcttacaccttctattaccttctgctctctctgatttggaaaaagctgaaaaaaaaggttgaaaccagttccctgaaattattcccctacttgactaataagtatataaagacggtaggtattgattgtaattctgtaaatctatttcttaaacttcttaaattctacttttatagttagtcttttttttagttttaaaacaccaagaacttagtttcgaaaaacaatggctaccaatggcgaaattttcaatacctatggtcataatcatcaatcagccacagtcactaaaatcactgcttctaatgaaagcagcaatggtgtctgttatctttcagaaacggctaacttggggaagttaatatgcattccaatggcactaagagctgcgatggagctaaatgtgttccaacttatctcaaagttcggaactgacgcaaaagtttcggcttctgaaattgcctctaaaatgccaaacgcgaagaataatcctgaagcagctatgtatttggatagaattcttcgactgctcggggcaagttctattctttctgtttctactacaaaaaaatcaatcaacagaggaggagatgatgtagtagtacatgagaagctttatgggttaacaaattcgtcgtgttgtttggtccctcgacaagaagacggggtgtcattagtcgaagaattgctattcacatctgacaaggttgttgtggatagttttttcaaactgaaatgtgtggtggaagaaaaagacagtgtgccatttgaggttgctcatggtgctaaaatctttgagtatgctgctacagaaccaagaatgaatcaagtatttaacgatggaatggcagttttctctattgttgtttttgaggctgtttttagagtttacgatggatttcttgatatgaaagaattgttagatgttggtggtggtattggtacttcggttagtaagattgttgctaaataccctttgattcgcggtgtcaacttcgacttgcctcatgttatttctgttgcccctcaatacccaggtgtagagcatgttgcaggagatatgttcgaggaagtcccaaagggtcaaaacatgttgctaaaatgggtactgcacgattggggtgatgaacgatgtgtgaagctgttaaagaattgttggaactcattacctgtgggtggaaaagttttgataatcgagtttgttctcccgaatgaacttggtaacaatgctgaatcattcaatgcgttgattcccgatttactcctgatggctctgaatccaggcggtaaagagcgaacgatttccgaatacgatgatttaggcaaagcagctggattcataaaaactatacctatccctatctccaatggtcttcatgtcattgagtttcacaaatgatcatgtaattagttatgtcacgcttacattcacgccctcctcccacatccgctctaaccgaaaaggaaggagttagacaacctgaagtctaggtccctatttattttttttaatagttatgttagtattaagaacgttatttatatttcaaatttttcttttttttctgtacaaacgcgtgtacgcatgtaacattatactgaaaaccttgcttgagaaggttttgggacgctcgaaggctttaatttgcggcaatcacatcaccatgagttgtctcatggcgggggtcggaatgattaaagaaaggggctgtgggcgagattggagactgcagcattactttgagaagacaggcattgctgggatcacccatacatcactctgttttgcctgaccttttccggtaatttgaaaacaaacccggtctcgaagcggagatccggcgataattaccgcagaaataaacccatacacgagacgtagaaccagccgcacatggccggagaaactcctgcgagaatttcgtaaactcgcgcgcattgcatctgtatttcctaatgcggcacttccaggcctcgagacctctgacatgcttttgacaggaatagacattttcagaatgttatccatatgcctttcgggtttttttccttccttttccatcatgaaaaatctctcgagaccgtttatccattgcttttttgttgtctttttccctcgttcacagaaagtctgaagaagctatagtagaactatgagctttttttgtttctgttttccttttttttttttttacctctgtggaaattgttactctcacactctttagttcgtttgtttgttttgtttattccaattatgaccggtgacgaaacgtggtcgatggtgggtaccgcttatgctcccctccattagtttcgattatataaaaaggccaaatattgtattattttcaaatgtcctatcattatcgtctaacatctaatttctcttaaattttttctctttctttcctataacaccaatagtgaaaatctttttttcttctatatctacaaaaactttttttttctatcaacctcgttgataaattttttctttaacaatcgttaataattaattaattggaaaataaccattttttctctcttttatacacacattcaaaagaaagaaaaaaaatataccccagctagttaaagaaaatcattgaaaagaataagaagataagaaagatttaattatcaaaaaaacaatgatcatgagtaacttatggattcttacgctcatttctaccatattagcagtctttgctgctgtgttaatcattttcaggagaagaatatcagcatccacaacggaatggcctgttggcccaaaaacattaccaatcataggtaacttgcacattcttggaggcactgctctccatgtcgtcttacataaacttgctgaagtttacggcagtgtaatgacgatatggattggtagttggaaacctgttattattgtttccgactttgatcgagcctgggaagttcttgttaacaaatcgtcagattattcagctcgtgaaatgcctgagatcactaaaatcggcactgcaaattggagaacaatttcaagttctgattctggtccgttttgggccactcttcgaaaaggtcttcagagtgtagcattatcgcctcagcatttagcatcgcaaactgcacaccaagagagagatataataaagttgatcaaaaatttgaaagacgaagcagctcttaattctggaatggttaaaccacttgatcatctcaagaaagcaactgtaagattaatcagtcggttaatctatggtcaggattttgatgacgataagtatgttgaagatatgcatgacgtgatcgagtttttgattcgtattagtggttatgctcaacttgctgaggtattctattatgctaaatatctaccaagtcataagagagctgtaactggcgccgaagaagcaaaaagaagagtaatagctctggtgcgtccttttcttcagtcaaaccctgctactaacacttacttgcattttctcaaatcgcaactgtatcctgaagaggttatcatattcgctatattcgaagcttatcttttaggtgttgatagcacttcttcaaccactgcatgggcactcgcattcttaatacgtgaaccatctgttcaagagaaactttatcaagagcttaagaatttcacagccaataacaatcgcacaatgctgaaagtcgaagacgtcaacaaattaccatatttacaagctgttgttaaagaaacaatgaggatgaaaccaattgcaccactggcgattcctcataaagcttgtaaagacacttcattgatgggcaagaaagttgataagggaactaaagttatggttaacattcatgctttacatcatactgaaaaggtttggaaagaaccttacaaattcatgccagagaggtttctgcagaagcacgataaggcgatggaacaatcactattaccatttagtgcaggtatgagaatttgtgcaggaatggaattaggaaaacttcagtttagtttttctcttgctaatcttgttaatgcttttaaatggtcttgtgtgtctgatggagtgcttcctgatatgagtgatttactggggtttgttctgttcatgaaaaccccactcgaagcacgtatagttcctcgtttgtagaacaaatcgctcttaaatatatacctaaagaacattaaagctatattataagcaaagatacgtaaattttgcttatattattatacacatatcatatttctatatttttaagatttggttatataatgtacgtaatgcaaaggaaataaattttatacattattgaacagcgtccaagtaactacattatgtgcactaatagtttagcgtcgtgaagactttattgtgtcgcgaaaagtaaaaattttaaaaattagagcaccttgaacttgcgaaaaaggttctcatcaactgtttaaaaggaggatatcaggtcctatttctgacaaacaatatacaaatttagtttcaaagatgaatcagtgcgcgaaggacataactcatgaagcctccagtataccggcaatcacatcaccatgagttgtgcggccgcggtacctaataacttcgtatagcatacattatacgaagttatattaagggttctcgacgttttcgacactggatggcggcgttagtatcgaatcgacagcagtatagcgaccagcattcacatacgattgacgcatgatattactttctgcgcacttaacttcgcatctgggcagatgatgtcgaggcgaaaaaaaatataaatcacgctaacatttgattaaaatagaacaactacaatataaaaaaactatacaaatgacaagttcttgaaaacaagaatctttttattgtcagtactgattagaaaaactcatcgagcatcaaatgaaactgcaatttattcatatcaggattatcaataccatatttttgaaaaagccgtttctgtaatgaaggagaaaactcaccgaggcagttccataggatggcaagatcctggtatcggtctgcgattccgactcgtccaacatcaatacaacctattaatttcccctcgtcaaaaataaggttatcaagtgagaaatcaccatgagtgacgactgaatccggtgagaatggcaaaagcttatgcatttctttccagacttgttcaacaggccagccattacgctcgtcatcaaaatcactcgcatcaaccaaaccgttattcattcgtgattgcgcctgagcgagacgaaatacgcgatcgctgttaaaaggacaattacaaacaggaatcgaatgcaaccggcgcaggaacactgccagcgcatcaacaatattttcacctgaatcaggatattcttctaatacctggaatgctgttttgccggggatcgcagtggtgagtaaccatgcatcatcaggagtacggataaaatgcttgatggtcggaagaggcataaattccgtcagccagtttagtctgaccatctcatctgtaacatcattggcaacgctacctttgccatgtttcagaaacaactctggcgcatcgggcttcccatacaatcgatagattgtcgcacctgattgcccgacattatcgcgagcccatttatacccatataaatcagcatccatgttggaatttaatcgcggcctcgaaacgtgagtcttttccttacccatggttgtttatgttcggatgtgatgtgagaactgtatcctagcaagattttaaaaggaagtatatgaaagaagaacctcagtggcaaatcctaaccttttatatttctctacaggggcgcggcgtggggacaattcaacgcgtctgtgaggggagcgtttccctgctcgcaggtctgcagcgaggagccgtaatttttgcttcgcgccgtgcggccatcaaaatgtatggatgcaaatgattatacatggggatgtatgggctaaatgtacgggcgacagtcacatcatgcccctgagctgcgcacgtcaagactgtcaaggagggtattctgggcctccatgtcgctggccgggtgacccggcggggacgaggcaagctaaacagatctctagacctaataacttcgtatagcatacattatacgaagttatattaagggttgtcttaattaagggtgcccaattcgccctatagtgagtcgtattacgcgcgctcactggccgtcgttttacaacgtcgtgactgggaaaaccctggcgttacccaacttaatcgccttgcagcacatccccctttcgccagctggcgtaatagcgaagaggcccgcaccgatcgcccttcccaacagttgcgcagcctgaatggcgaatggcgcgacgcgccctgtagcggcgcattaagcgcggcgggtgtggtggttacgcgcagcgtgaccgctacacttgccagcgccctagcgcccgctcctttcgctttcttcccttcctttctcgccacgttcgccggctttccccgtcaagctctaaatcgggggctccctttagggttccgatttagtgctttacggcacctcgaccccaaaaaacttgattagggtgatggttcacgtagtgggccatcgccctgatagacggtttttcgccctttgacgttggagtccacgttctttaatagtggactcttgttccaaactggaacaacactcaaccctatctcggtctattcttttgatttataagggattttgccgatttcggcctattggttaaaaaatgagctgatttaacaaaaatttaacgcgaattttaacaaaatattaacgtttacaatttcctgatgcggtattttctccttacgcatctgtgcggtatttcacaccgcatagggtaataactgatataattaaattgaagctctaatttgtgagtttagtatacatgcatttacttataatacagttttttagttttgctggccgcatcttctcaaatatgcttcccagcctgcttttctgtaacgttcaccctctaccttagcatcccttccctttgcaaatagtcctcttccaacaataataatgtcagatcctgtagagaccacatcatccacggttctatactgttgacccaatgcgtctcccttgtcatctaaacccacaccgggtgtcataatcaaccaatcgtaaccttcatctcttccacccatgtctctttgagcaataaagccgataacaaaatctttgtcgctcttcgcaatgtcaacagtacccttagtatattctccagtagatagggagcccttgcatgacaattctgctaacatcaaaaggcctctaggttcctttgttacttcttctgccgcctgcttcaaaccgctaacaatacctgggcccaccacaccgtgtgcattcgtaatgtctgcccattctgctattctgtatacacccgcagagtactgcaatttgactgtattaccaatgtcagcaaattttctgtcttcgaagagtaaaaaattgtacttggcggataatgcctttagcggcttaactgtgccctccatggaaaaatcagtcaagatatccacatgtgtttttagtaaacaaattttgggacctaatgcttcaactaactccagtaattccttggtggtacgaacatccaatgaagcacacaagtttgtttgcttttcgtgcatgatattaaatagcttggcagcaacaggactaggatgagtagcagcacgttccttatatgtagctttcgacatgatttatcttcgtttcctgcaggtttttgttctgtgcagttgggttaagaatactgggcaatttcatgtttcttcaacactacatatgcgtatatataccaatctaagtctgtgctccttccttcgttcttccttctgttcggagattaccgaatcaaaaaaatttcaaagaaaccgaaatcaaaaaaaagaataaaaaaaaaatgatgaattgaattgaaaagctgtggtatggtgcactctcagtacaatctgctctgatgccgcatagttaagccagccccgacacccgccaacacccgctgacgcgccctgacgggcttgtctgctcccggcatccgcttacagacaagctgtgaccgtctccgggagctgcatgtgtcagaggttttcaccgtcatcaccgaaacgcgcgagacgaaagggcctcgtgatacgcctatttttataggttaatgtcatgataataatggtttcttaggacggatcgcttgcctgtaacttacacgcgcctcgtatcttttaatgatggaataatttgggaatttactctgtgtttatttatttttatgttttgtatttggattttagaaagtaaataaagaaggtagaagagttacggaatgaagaaaaaaaaataaacaaaggtttaaaaaatttcaacaaaaagcgtactttacatatatatttattagacaagaaaagcagattaaatagatatacattcgattaacgataagtaaaatgtaaaatcacaggattttcgtgtgtggtcttctacacagacaagatgaaacaattcggcattaatacctgagagcaggaagagcaagataaaaggtagtatttgttggcgatccccctagagtcttttacatcttcggaaaacaaaaactattttttctttaatttctttttttactttctatttttaatttatatatttatattaaaaaatttaaattataattatttttatagcacgtgatgaaaaggacccaggtggcacttttcggggaaatgtgcgcggaacccctatttgtttatttttctaaatacattcaaatatgtatccgctcatgagacaataaccctgataaatgcttcaataatattgaaaaaggaagagtatgagtattcaacatttccgtgtcgcccttattcccttttttgcggcattttgccttcctgtttttgctcacccagaaacgctggtgaaagtaaaagatgctgaagatcagttgggtgcacgagtgggttacatcgaactggatctcaacagcggtaagatccttgagagttttcgccccgaagaacgttttccaatgatgagcacttttaaagttctgctatgtggcgcggtattatcccgtattgacgccgggcaagagcaactcggtcgccgcatacactattctcagaatgacttggttgagtactcaccagtcacagaaaagcatcttacggatggcatgacagtaagagaattatgcagtgctgccataaccatgagtgataacactgcggccaacttacttctgacaacgatcggaggaccgaaggagctaaccgcttttttgcacaacatgggggatcatgtaactcgccttgatcgttgggaaccggagctgaatgaagccataccaaacgacgagcgtgacaccacgatgcctgtagcaatggcaacaacgttgcgcaaactattaactggcgaactacttactctagcttcccggcaacaattaatagactggatggaggcggataaagttgcaggaccacttctgcgctcggcccttccggctggctggtttattgctgataaatctggagccggtgagcgtgggtctcgcggtatcattgcagcactggggccagatggtaagccctcccgtatcgtagttatctacacgacggggagtcaggcaactatggatgaacgaaatagacagatcgctgagataggtgcctcactgattaagcattggtaactgtcagaccaagtttactcatatatactttagattgatttaaaacttcatttttaatttaaaaggatctaggtgaagatcctttttgataatctcatgaccaaaatcccttaacgtgagttttcgttccactgagcgtcagaccccgtagaaaagatcaaaggatcttcttgagatcctttttttctgcgcgtaatctgctgcttgcaaacaaaaaaaccaccgctaccagcggtggtttgtttgccggatcaagagctaccaactctttttccgaaggtaactggcttcagcagagcgcagataccaaatactgtccttctagtgtagccgtagttaggccaccacttcaagaactctgtagcaccgcctacatacctcgctctgctaatcctgttaccagtggctgctgccagtggcgataagtcgtgtcttaccgggttggactcaagacgatagttaccggataaggcgcagcggtcgggctgaacggggggttcgtgcacacagcccagcttggagcgaacgacctacaccgaactgagatacctacagcgtgagctatgagaaagcgccacgcttcccgaagggagaaaggcggacaggtatccggtaagcggcagggtcggaacaggagagcgcacgagggagcttccagggggaaacgcctggtatctttatagtcctgtcgggtttcgccacctctgacttgagcgtcgatttttgtgatgctcgtcaggggggcggagcctatggaaaaacgccagcaacgcggcctttttacggttcctggccttttgctggccttttgctcacatgttctttcctgcgttatcccctgattctgtggataaccgtattaccgcctttgagtgagctgataccgctcgccgcagccgaacgaccgagcgcagcgagtcagtgagcgaggaagcggaagagcgcccaatacgcaaaccgcctctccccgcgcgttggccgattcattaatgcagctggcacgacaggtttcccgactggaaagcgggcagtgagcgcaacgcaattaatgtgagttacctcactcattaggcaccccaggctttacactttatgcttccggctcctatgttgtgtggaattgtgagcggataacaatttcacacaggaaacagctatgaccatgattacgccaagcgcgcaattaaccctcactaaagggaac

SEQ ID NO: 557 - DNA, 8901 bp, Artificial Sequence
  Synthetic sequence
cgtttaaacggcgcgccgagactgcagcattactttgagaagtcgagtttatcattatcaatactgccatttcaaagaatacgtaaataattaatagtagtgattttcctaactttatttagtcaaaaaattagccttttaattctgctgtaacccgtacatgcccaaaatagggggcgggttacacagaatatataacatcgtaggtgtctgggtgaacagtttattcctggcatccactaaatataatggagcccgctttttaagctggcatccagaaaaaaaaagaatcccagcaccaaaatattgttttcttcaccaaccatcagttcataggtccattctcttagcgcaactacagagaacaggggcacaaacaggcaaaaaacgggcacaacctcaatggagtgatgcaacctgcctggagtaaatgatgacacaaggcaattgacccacgcatgtatctatctcattttcttacaccttctattaccttctgctctctctgatttggaaaaagctgaaaaaaaaggttgaaaccagttccctgaaattattcccctacttgactaataagtatataaagacggtaggtattgattgtaattctgtaaatctatttcttaaacttcttaaattctacttttatagttagtcttttttttagttttaaaacaccaagaacttagtttcgaaaaacaatggaggtgacattttggttgataacttgtggagtggtagtagcatttgcattagcaaaactactattcggcaagaaatcatctatgtccacaatggaatggccatcaggtccaaagacgttgcccataattgggaaccttcatcaattaggaggagaagcatttcatgtctgtttggcaaacttggccaaagtatatggaggtgtttttaccatatgggttggaagttggcgtccgtttatagtcataagcgatgtcgataaagcttgggaagttcttgttaacaaatcttcggattattcagctagagacatgcctgatattactaaaatcatatctgcaaactggaagaatatttctcatggtgattccggtccgttttggcataatttaagaaaaggtcttcaaggtgttgctttaactccttttaatgttgcgtctcaatatcatttgcaagaaagggacatgcagaatttgatcaaatccatgaaaaaaaaggcgtcccagaaaaatgggattttgaaaccacttgattatgtcaaagaagagactgttcggttactaagtcgacttatcttcggtcaagatttcgtcgatgaggatttcgttgttggtatgcatcaagcactggacgagttagtaagtataagtgggtatgcaagtttagctgatgcttttaaattctgtgagaatctaccaagccataagaaaactgtccgagcagttcacgctatcaaaattcggttcgataatttgattcgtccgcatatcgtctcaaatcctccgacaaacacttacttacattttcttttatctcaagattttagtgaagatgttataatctctgccattcttgaagtttatgacttaggggttgacagcactgcatccacaacagtttgggctcttacgttccttgtccgcgaacaaaagattcaggaaaaactgtaccgcgagatcaataacgtaaccggagggaaaaaaccggtgaaagttgaagatttgaacaaattgccatatttgcaagcagtgatgaaagaaacaatgaggatgaaaccaatcgcaccaatggcgattcctcacaaggcttcaaaagatacttccttaatgggtaaaaagatcaacaaaggtgcggtggtaatggtaaatctttatgctattcatcataaccctgccgttttcccggaaccgtataagttcatgcccgagagattcctaaaggatgctaatagtgatggaagtttgggtgatataaagaaaatggaaagttcattgttagcattcagtgccggtatgcgaatctgtgctggaatggagcttggtaagctacaactagctttcggtcttgcaagtttggtgaatgagttcaaatgggattgctttgctgaagggaagttgcctgatcttagtgaagaacactgtttcattctgttgatgaagaacccacttgaagccaaaattactcctcgtatccattaatcatgtaattagttatgtcacgcttacattcacgccctcctcccacatccgctctaaccgaaaaggaaggagttagacaacctgaagtctaggtccctatttattttttttaatagttatgttagtattaagaacgttatttatatttcaaatttttcttttttttctgtacaaacgcgtgtacgcatgtaacattatactgaaaaccttgcttgagaaggttttgggacgctcgaaggctttaatttgcggcaatcacatcaccatgagttgtgcggccgcggtacctaataacttcgtatagcatacattatacgaagttatattaagggttctcgacgttttcgacactggatggcggcgttagtatcgaatcgacagcagtatagcgaccagcattcacatacgattgacgcatgatattactttctgcgcacttaacttcgcatctgggcagatgatgtcgaggcgaaaaaaaatataaatcacgctaacatttgattaaaatagaacaactacaatataaaaaaactatacaaatgacaagttcttgaaaacaagaatctttttattgtcagtactgattagaaaaactcatcgagcatcaaatgaaactgcaatttattcatatcaggattatcaataccatatttttgaaaaagccgtttctgtaatgaaggagaaaactcaccgaggcagttccataggatggcaagatcctggtatcggtctgcgattccgactcgtccaacatcaatacaacctattaatttcccctcgtcaaaaataaggttatcaagtgagaaatcaccatgagtgacgactgaatccggtgagaatggcaaaagcttatgcatttctttccagacttgttcaacaggccagccattacgctcgtcatcaaaatcactcgcatcaaccaaaccgttattcattcgtgattgcgcctgagcgagacgaaatacgcgatcgctgttaaaaggacaattacaaacaggaatcgaatgcaaccggcgcaggaacactgccagcgcatcaacaatattttcacctgaatcaggatattcttctaatacctggaatgctgttttgccggggatcgcagtggtgagtaaccatgcatcatcaggagtacggataaaatgcttgatggtcggaagaggcataaattccgtcagccagtttagtctgaccatctcatctgtaacatcattggcaacgctacctttgccatgtttcagaaacaactctggcgcatcgggcttcccatacaatcgatagattgtcgcacctgattgcccgacattatcgcgagcccatttatacccatataaatcagcatccatgttggaatttaatcgcggcctcgaaacgtgagtcttttccttacccatggttgtttatgttcggatgtgatgtgagaactgtatcctagcaagattttaaaaggaagtatatgaaagaagaacctcagtggcaaatcctaaccttttatatttctctacaggggcgcggcgtggggacaattcaacgcgtctgtgaggggagcgtttccctgctcgcaggtctgcagcgaggagccgtaatttttgcttcgcgccgtgcggccatcaaaatgtatggatgcaaatgattatacatggggatgtatgggctaaatgtacgggcgacagtcacatcatgcccctgagctgcgcacgtcaagactgtcaaggagggtattctgggcctccatgtcgctggccgggtgacccggcggggacgaggcaagctaaacagatctctagacctaataacttcgtatagcatacattatacgaagttatattaagggttgtcttaattaagggtgcccaattcgccctatagtgagtcgtattacgcgcgctcactggccgtcgttttacaacgtcgtgactgggaaaaccctggcgttacccaacttaatcgccttgcagcacatccccctttcgccagctggcgtaatagcgaagaggcccgcaccgatcgcccttcccaacagttgcgcagcctgaatggcgaatggcgcgacgcgccctgtagcggcgcattaagcgcggcgggtgtggtggttacgcgcagcgtgaccgctacacttgccagcgccctagcgcccgctcctttcgctttcttcccttcctttctcgccacgttcgccggctttccccgtcaagctctaaatcgggggctccctttagggttccgatttagtgctttacggcacctcgaccccaaaaaacttgattagggtgatggttcacgtagtgggccatcgccctgatagacggtttttcgccctttgacgttggagtccacgttctttaatagtggactcttgttccaaactggaacaacactcaaccctatctcggtctattcttttgatttataagggattttgccgatttcggcctattggttaaaaaatgagctgatttaacaaaaatttaacgcgaattttaacaaaatattaacgtttacaatttcctgatgcggtattttctccttacgcatctgtgcggtatttcacaccgcatagatccgtcgagttcaagagaaaaaaaaagaaaaagcaaaaagaaaaaaggaaagcgcgcctcgttcagaatgacacgtatagaatgatgcattaccttgtcatcttcagtatcatactgttcgtatacatacttactgacattcataggtatacatatatacacatgtatatatatcgtatgctgcagctttaaataatcggtgtcactacataagaacacctttggtggagggaacatcgttggtgccattgggcgaggtggcttctcttatggcaaccgcaagagccttgaacgcactctcactacggtgatgatcattcttgcctcgcagacaatcaacgtggagggtaattctgctagcctctgcaaagctttcaagaaaatgcgggatcatctcgcaagagagatctcctactttctccctttgcaaaccaagttcgacaactgcgtacggcctgttcgaaagatctaccaccgctctggaaagtgcctcatccaaaggcgcaaatcctgatccaaacctttttactccacgcgccagtagggcctctttaaaagcttgaccgagagcaatcccgcagtcttcagtggtgtgatggtcgtctatgtgtaagtcaccaatgcactcaacgattagcgaccagccggaatgcttggccagagcatgtatcatatggtccagaaaccctatacctgtgtggacgttaatcacttgcgattgtgtggcctgttctgctactgcttctgcctctttttctgggaagatcgagtgctctatcgctaggggaccaccctttaaagagatcgcaatctgaatcttggtttcatttgtaatacgctttactagggctttctgctctgtcatctttgccttcgtttatcttgcctgctcattttttagtatattcttcgaagaaatcacattactttatataatgtataattcattatgtgataatgccaatcgctaagaaaaaaaaagagtcatccgctaggggaaaaaaaaaaatgaaaatcattaccgaggcataaaaaaatatagagtgtactagaggaggccaagagtaatagaaaaagaaaattgcgggaaaggactgtgttatgacttccctgactaatgccgtgttcaaacgatacctggcagtgactcctagcgctcaccaagctcttaaaacgggaatttatggtgcactctcagtacaatctgctctgatgccgcatagttaagccagccccgacacccgccaacacgcgctgacgcgccctgacgggcttgtctgctcccggcatccgcttacagacaagctgtgaccgtctccgggagctgcatgtgtcagaggttttcaccgtcatcaccgaaacgcgcgagacgaaagggcctcgtgatacgcctatttttataggttaatgtcatgataataatggtttcttaggacggatcgcttgcctgtaacttacacgcgcctcgtatcttttaatgatggaataatttgggaatttactctgtgtttatttatttttatgttttgtatttggattttagaaagtaaataaagaaggtagaagagttacggaatgaagaaaaaaaaataaacaaaggtttaaaaaatttcaacaaaaagcgtactttacatatatatttattagacaagaaaagcagattaaatagatatacattcgattaacgataagtaaaatgtaaaatcacaggattttcgtgtgtggtcttctacacagacaagatgaaacaattcggcattaatacctgagagcaggaagagcaagataaaaggtagtatttgttggcgatccccctagagtcttttacatcttcggaaaacaaaaactattttttctttaatttctttttttactttctatttttaatttatatatttatattaaaaaatttaaattataattatttttatagcacgtgatgaaaaggacccaggtggcacttttcggggaaatgtgcgcggaacccctatttgtttatttttctaaatacattcaaatatgtatccgctcatgagacaataaccctgataaatgcttcaataatattgaaaaaggaagagtatgagtattcaacatttccgtgtcgcccttattcccttttttgcggcattttgccttcctgtttttgctcacccagaaacgctggtgaaagtaaaagatgctgaagatcagttgggtgcacgagtgggttacatcgaactggatctcaacagcggtaagatccttgagagttttcgccccgaagaacgttttccaatgatgagcacttttaaagttctgctatgtggcgcggtattatcccgtattgacgccgggcaagagcaactcggtcgccgcatacactattctcagaatgacttggttgagtactcaccagtcacagaaaagcatcttacggatggcatgacagtaagagaattatgcagtgctgccataaccatgagtgataacactgcggccaacttacttctgacaacgatcggaggaccgaaggagctaaccgcttttttgcacaacatgggggatcatgtaactcgccttgatcgttgggaaccggagctgaatgaagccataccaaacgacgagcgtgacaccacgatgcctgtagcaatggcaacaacgttgcgcaaactattaactggcgaactacttactctagcttcccggcaacaattaatagactggatggaggcggataaagttgcaggaccacttctgcgctcggcccttccggctggctggtttattgctgataaatctggagccggtgagcgtgggtctcgcggtatcattgcagcactggggccagatggtaagccctcccgtatcgtagttatctacacgacggggagtcaggcaactatggatgaacgaaatagacagatcgctgagataggtgcctcactgattaagcattggtaactgtcagaccaagtttactcatatatactttagattgatttaaaacttcatttttaatttaaaaggatctaggtgaagatcctttttgataatctcatgaccaaaatcccttaacgtgagttttcgttccactgagcgtcagaccccgtagaaaagatcaaaggatcttcttgagatcctttttttctgcgcgtaatctgctgcttgcaaacaaaaaaaccaccgctaccagcggtggtttgtttgccggatcaagagctaccaactctttttccgaaggtaactggcttcagcagagcgcagataccaaatactgtccttctagtgtagccgtagttaggccaccacttcaagaactctgtagcaccgcctacatacctcgctctgctaatcctgttaccagtggctgctgccagtggcgataagtcgtgtcttaccgggttggactcaagacgatagttaccggataaggcgcagcggtcgggctgaacggggggttcgtgcacacagcccagcttggagcgaacgacctacaccgaactgagatacctacagcgtgagctatgagaaagcgccacgcttcccgaagggagaaaggcggacaggtatccggtaagcggcagggtcggaacaggagagcgcacgagggagcttccagggggaaacgcctggtatctttatagtcctgtcgggtttcgccacctctgacttgagcgtcgatttttgtgatgctcgtcaggggggcggagcctatggaaaaacgccagcaacgcggcctttttacggttcctggccttttgctggccttttgctcacatgttctttcctgcgttatcccctgattctgtggataaccgtattaccgcctttgagtgagctgataccgctcgccgcagccgaacgaccgagcgcagcgagtcagtgagcgaggaagcggaagagcgcccaatacgcaaaccgcctctccccgcgcgttggccgattcattaatgcagctggcacgacaggtttcccgactggaaagcgggcagtgagcgcaacgcaattaatgtgagttacctcactcattaggcaccccaggctttacactttatgcttccggctcctatgttgtgtggaattgtgagcggataacaatttcacacaggaaacagctatgaccatgattacgccaagcgcgcaattaaccctcactaaagggaacaaaagctggagct

SEQ ID NO: 558 - DNA, 3038 bp, Artificial Sequence
  Synthetic sequence
atgaccatgattacgccaagcgcgcaattaaccctcactaaagggaacaaaagctggagctcgtttaaacggcgcgccgagactgcagcattactttgagaagacaggcattgctgggatcacccatacatcactctgttttgcctgaccttttccggtaatttgaaaacaaacccggtctcgaagcggagatccggcgataattaccgcagaaataaacccatacacgagacgtagaaccagccgcacatggccggagaaactcctgcgagaatttcgtaaactcgcgcgcattgcatctgtatttcctaatgcggcacttccaggcctcgagacctctgacatgcttttgacaggaatagacattttcagaatgttatccatatgcctttcgggtttttttccttccttttccatcatgaaaaatctctcgagaccgtttatccattgcttttttgttgtctttttccctcgttcacagaaagtctgaagaagctatagtagaactatgagctttttttgtttctgttttccttttttttttttttacctctgtggaaattgttactctcacactctttagttcgtttgtttgttttgtttattccaattatgaccggtgacgaaacgtggtcgatggtgggtaccgcttatgctcccctccattagtttcgattatataaaaaggccaaatattgtattattttcaaatgtcctatcattatcgtctaacatctaatttctcttaaattttttctctttctttcctataacaccaatagtgaaaatctttttttcttctatatctacaaaaactttttttttctatcaacctcgttgataaattttttctttaacaatcgttaataattaattaattggaaaataaccattttttctctcttttatacacacattcaaaagaaagaaaaaaaatataccccagctagttaaagaaaatcattgaaaagaataagaagataagaaagatttaattatcaaaaaaacaatggaattatcgattactacctcaatagctctagccacaattgttttttttctatataagttggcaacacgtcctaaatccacgaagaaacaattacccgaagctagtcgtttaccaatcattggacacaagagaaagaaatcatccactatggtatggcctactgggcccaaaactctgccaattataggtaatatgcatgttttaggtggaacagcattgcaagttgtgttgcataatctggctaagatacatggcaacgttatgacaatttggattggttcgtggcgtcccgttatagtagttagcgacattgatagggcatgggaagtgttagttaacaagagctcagactactctgccagagatatgcctgaaatcaccaaaattatctcagcggattggaaaacaatctctacttccgattctggtcctggttggtccaatctaagaaaagggctacaaaatgttgctctttctccacataatcttgctgctcaaagtcaatttcaggagaaagacattactaaaatgattcagtctttgaagaaagaagctgcctctaataatgggattgttaaaccgattgatcacttgaagaaagctactcttagacttattagtagattgattttcggacaagattttgacgatgacaagtatgtcgatgatatgcatcatgctatcgaagagctgataagagtgtcaggttatgcgcaattggctgaagcattctactatgcgaaatacttgccatcacacaagaaggctgttagagatgtcgaagaagccaatcagagggtaaagaaattggttagaccgtttctttctttgaatcctccaaccaatacgtacttgcactttctgaacagtcagaaatacgatgaagaggtcattatctttgccatctttgaggcctatctattgggcgtagattccacctccttgaccaccgcatgggcattagcattccttatcagagaaccagtagtccaagacaaattatatcaagaactaaagaacttaacggctaagaatgattgcgaaattgtcaaagtggaagatttaaacaagcttcagtatttgcaagcagtactaaaagagacaatgagaatgaaacctatagcaccactagctatcccacacaaggcctgtagagatactagcttgaaaggcaacaaaatagaccagggtactcaagtaatggtcaatatatacgcattgcatcataacgaaaaggtatggaaggaaccttttaaatttatgccagaaaggttcttacaaacacaagatgtcgtgaacggtaaaggtatggagcagtcgttattgccgttctctgccggtatgagaatatgtgctggaatggaattaggtaaactgcaattcagcttctcattagccaacttggtgaatgcattcgagtggagttgtgttagtgatggagttttacctgacatgtctgaccaattaggctttgtgctgttgatgaaaacacccttacaagcgaggatagtcccaagagtttacccatacgatgttccagattacgcttagaacaaatcgctcttaaatatatacctaaagaacattaaagctatattataagcaaagatacgtaaattttgcttatattattatacacatatcatatttctatatttttaagatttggttatataatgtacgtaatgcaaaggaaataaattttatacattattgaacagcgtccaagtaactacattatgtgcactaatagtttagcgtcgtgaagactttattgtgtcgcgaaaagtaaaaattttaaaaattagagcaccttgaacttgcgaaaaaggttctcatcaactgtttaaaaggaggatatcaggtcctatttctgacaaacaatatacaaatttagtttcaaagatgaatcagtgcgcgaaggacataactcatgaagcctccagtataccggcaatcacatcaccatgagttgtgcggccgcggtacctaataacttcgtatagcatacattatacgaagttat

SEQ ID NO: 559 - protein, 390 aa, Artificial Sequence
  Synthetic sequence
MATNGEIFNTYGHNRQTATVTKITASNESSNGVCYLSETANLGKLICIPMALRAAMELNVFQLISKFGTDAKVSASEIASKMPNAKNNPEAAMYLDRILRLLGASSILSVSTTKKSINRGGDDVVVHEKLYGLTNSSCCLVPRQEDGVSLVEELLFTSDKVVVDSFFKLKCVVEEKDSVPFEVAHGAKIFEYAATEPRMNQVFNDGMAVFSIVVFEAVFRFYDGFLDMKELLDVGGGIGTSVSKIVAKYPLIRGVNFDLPHVISVAPQYPGVEHVAGDMFEEVPKGQNMLLKWVLHDWGDERCVKLLKNCWNSLPVGGKVLIIEFVLPNELGNNAESFNALIPDLLLMALNPGGKERTISEYDDLGKAAGFIKTIPIPISNGLHVIEFHK

SEQ ID NO: 560 - protein, 486 aa, Artificial Sequence
  Synthetic sequence
MIMSNLWILTLISTILAVFAAVLIIFRRRISASTTEWPVGPKTLPIIGNLHILGGTALHVVLHKLAEVYGSVMTIWIGSWKPVIIVSDFDRAWEVLVNKSSDYSAREMPEITKIGTANWRTISSSDSGPFWATLRKGLQSVALSPQHLASQTAHQERDIIKLIKNLKDEAASGMVKPLDHLKKATVRLISRLIYGQDFDDDKYVEDMHDVIEFLIRISGYAQLAEVFYYAKYLPGHKRAVTGAEEAKRRVIALVRPFLQSNPATNTYLHFLKSQLYPEEVIIFAIFEAYLLGVDSTSSTTAWALAFLIREPSVQEKLYQELKNFTANNNRTMLKVEDVNKLPYLQAVVKETMRMKPIAPLAIPHKACKDTSLMGKKVDKGTKVMVNIHALHHTEKVWKEPYKFIPERFLQKHDKAMEQSLLPFSAGMRICAGMELGKLQFSFSLANLVNAFKWSCVSDGVLPDMSDLLGFVLFMKTPLEARIVPRL

SEQ ID NO: 561 - DNA, 6826 bp, Artificial Sequence
  Synthetic sequence
tcgagtttatcattatcaatactgccatttcaaagaatacgtaaataattaatagtagtgattttcctaactttatttagtcaaaaaattagccttttaattctgctgtaacccgtacatgcccaaaatagggggcgggttacacagaatatataacatcgtaggtgtctgggtgaacagtttattcctggcatccactaaatataatggagcccgctttttaagctggcatccagaaaaaaaaagaatcccagcaccaaaatattgttttcttcaccaaccatcagttcataggtccattctcttagcgcaactacagagaacaggggcacaaacaggcaaaaaacgggcacaacctcaatggagtgatgcaacctgcctggagtaaatgatgacacaaggcaattgacccacgcatgtatctatctcattttcttacaccttctattaccttctgctctctctgatttggaaaaagctgaaaaaaaaggttgaaaccagttccctgaaattattcccctacttgactaataagtatataaagacggtaggtattgattgtaattctgtaaatctatttcttaaacttcttaaattctacttttatagttagtcttttttttagttttaaaacaccaagaacttagtttcgaaaacatgaagagcctagaaaatttattataaaaggaagagaaataattaaacagctcttctggcgccgctggctccgctgctggttctggcgaattcatgagtaaaggagaagaacttttcactggagttgtcccaattcttgttgaattagatggtgatgttaatgggcacaaattttctgtcagtggagagggtgaaggtgatgcaacatacggaaaacttacccttaaatttatttgcactactggaaaactacctgttccatggccaacacttgtcactactttcacttatggtgttcaatgcatttcaagatacccagatcatatgaaacggcatgactttttcaagagtgccatgcccgaaggttatgtacaggaaagaactatatttttcaaagatgacgggaactacaagacacgtgctgaagtcaagtttgaaggtgatacccttgttaatagaatcgagttaaaaggtattgattttaaagaagatggaaacattcttggacacaaattggaatacaactataactcacacaatgtatacatcatggcagacaaacaaaagaatggaatcaaagttaacttcaaaattagacacaacattgaagatggaagcgttcaactagcagaccattatcaacaaaatactccaattggcgatggccctgtccttttaccagacaaccattacctgtccacacaatctgccctttcgaaagatcccaacgaaaagagagaccacatggtccttcttgagtttgtaacagctgctgggattacacatggcatggatgaactatacaaataaggcgcctaatcatgtaattagttatgtcacgcttacattcacgccctccccccacatccgctctaaccgaaaaggaaggagttagacaacctgaagtctaggtccctatttatttttttatagttatgttagtattaagaacgttatttatatttcaaatttttcttttttttctgtacaaacgcgtgtacgcatgtaacattatactgaaaaccttgcttgagaaggttttgggacgctcgaaggctttaatttgccctctttatattacatcaaaataagaaaataattataacacagatccgcggccgcataggccactagtggatctgatatcacctaataacttcgtatagcatacattatacgaagttatattaagggttctcgagagctcgttttcgacactggatggcggcgttagtatcgaatcgacagcagtatagcgaccagcattcacatacgattgacgcatgatattactttctgcgcacttaacttcgcatctgggcagatgatgtcgaggcgaaaaaaaatataaatcacgctaacatttgattaaaatagaacaactacaatataaaaaaactatacaaatgacaagttcttgaaaacaagaatctttttattgtcagtactgattagaaaaactcatcgagcatcaaatgaaactgcaatttattcatatcaggattatcaataccatatttttgaaaaagccgtttctgtaatgaaggagaaaactcaccgaggcagttccataggatggcaagatcctggtatcggtctgcgattccgactcgtccaacatcaatacaacctattaatttcccctcgtcaaaaataaggttatcaagtgagaaatcaccatgagtgacgactgaatccggtgagaatggcaaaagcttatgcatttctttccagacttgttcaacaggccagccattacgctcgtcatcaaaatcactcgcatcaaccaaaccgttattcattcgtgattgcgcctgagcgagacgaaatacgcgatcgctgttaaaaggacaattacaaacaggaatcgaatgcaaccggcgcaggaacactgccagcgcatcaacaatattttcacctgaatcaggatattcttctaatacctggaatgctgttttgccggggatcgcagtggtgagtaaccatgcatcatcaggagtacggataaaatgcttgatggtcggaagaggcataaattccgtcagccagtttagtctgaccatctcatctgtaacatcattggcaacgctacctttgccatgtttcagaaacaactctggcgcatcgggcttcccatacaatcgatagattgtcgcacctgattgcccgacattatcgcgagcccatttatacccatataaatcagcatccatgttggaatttaatcgcggcctcgaaacgtgagtcttttccttacccatggttgtttatgttcggatgtgatgtgagaactgtatcctagcaagattttaaaaggaagtatatgaaagaagaacctcagtggcaaatcctaaccttttatatttctctacaggggcgcggcgtggggacaattcaacgcgtctgtgaggggagcgtttccctgctcgcaggtctgcagcgaggagccgtaatttttgcttcgcgccgtgcggccatcaaaatgtatggatgcaaatgattatacatggggatgtatgggctaaatgtacgggcgacagtcacatcatgcccctgagctgcgcacgtcaagactgtcaaggagggtattctgggcctccatgtcgctggccgggtgacccggcggggacgaggcaagctaaacagatctctagacctaataacttcgtatagcatacattatacgaagttatattaagggttgtcgaggataagtgtgtaattaaagatcaaagccagtctaggtcatatgaggcaagtgcacaaacaatacttaaataaatactactcagtaataacctatttcttagcatttttgacgaaatttgctattttgttagagtcttttacaccatttgtctccacacctccgcttacatcaacaccaataacgccatttaatctaagcgcatcaccaacattttctggcgtcagtccaccagctaacataaaatgtaagctttcggggctctcttgccttccaacccagtcagaaatcgagttccaatccaaaagttcacctgtcccacctgcttctgaatcaaacaagggaataaacgaatgaggtttctgtgaagctgcactgagtagtatgttgcagtcttttggaaatacgagtcttttaataactggcaaaccgaggaactcttggtattcttgccacgactcatctccatgcagttggacgatatcaatgccgtaatcattgaccagagccaaaacatcctccttaggttgattacgaaacacgccaaccaagtatttcggagtgcctgaactatttttatatgcttttacaagacttgaaattttccttgcaataaccgggtcaattgttctctttctattgggcacacatataatacccagcaagtcagcatcggaatctagagcacattctgcggcctctgtgctctgcaagccgcaaactttcaccaatggaccagaactacctgtgaaattaataacagacatactccaagctgcctttgtgtgcttaatcacgtatactcacgtgctcaatagtcaccaatgccctccctcttggccctctccttttcttttttcgaccgaattaattcttaatcggcaaaaaaagaaaagctccggatcaagattgtacgtaaggtgacaagctatttttcaataaagaatatcttccactactgccatctggcgtcataactgcaaagtacacatatattacgatgctgttctattaaatgcttcctatattatatatatagtaatgtcgttgtatctcatcatcaaaggcaccactcacgtcaggcaacagggacggatcgcttgcctgtaacttacacgcgcctcgtatcttttaatgatggaataatttgggaatttactctgtgtttatttatttttatgttttgtatttggattttagaaagtaaataaagaaggtagaagagttacggaatgaagaaaaaaaaataaacaaaggtttaaaaaatttcaacaaaaagcgtactttacatatatatttattagacaagaaaagcagattaaatagatatacattcgattaacgataagtaaaatgtaaaatcacaggattttcgtgtgtggtcttctacacagacaagatgaaacaattcggcattaatacctgagagcaggaagaggaagataaaaggtagtatttgttggcgatccccctagagtcttttacatcttcggaaaacaaaaactattttttctttaatttctttttttactttctatttttaatttatatatttatattaaaaaatttaaattataattatttttatagcacgtgatgaaaaggaccttaagacctattgcagacactcctactttaccgacgtcagcaggtggcacttttcggggaaatgtgcgcggaacccctatttgtttatttttctaaatacattcaaatatgtatccgctcatgagacaataaccctgataaatgcttcaataatattgaaaaaggaagagtatgagtattcaacatttccgtgtcgcccttattcccttttttgcggcattttgccttcctgtttttgctcacccagaaacgctggtgaaagtaaaagatgctgaagatcagttgggtgcacgagtgggttacatcgaactggatctcaacagcggtaagatccttgagagttttcgccccgaagaacgttttccaatgatgagcacttttaaagttctgctatgtggcgcggtattatcccgtattgacgccgggcaagagcaactcggtcgccgcatacactattctcagaatgacttggttgagtactcaccagtcacagaaaagcatcttacggatggcatgacagtaagagaattatgcagtgctgccataaccatgagtgataacactgcggccaacttacttctgacaacgatcggaggaccgaaggagctaaccgcttttttgcacaacatgggggatcatgtaactcgccttgatcgttgggaaccggagctgaatgaagccataccaaacgacgagcgtgacaccacgatgcctgtagcaatggcaacaacgttgcgcaaactattaactggcgaactacttactctagcttcccggcaacaattaatagactggatggaggcggataaagttgcaggaccacttctgcgctcggcccttccggctggctggtttattgctgataaatctggagccggtgagcgtgggtctcgcggtatcattgcagcactggggccagatggtaagccctcccgtatcgtagttatctacacgacggggagtcaggcaactatggatgaacgaaatagacagatcgctgagataggtgcctcactgattaagcattggtaactgtcagaccaagtttactcatatatactttagattgatttaaaacttcatttttaatttaaaaggatctaggtgaagatcctttttgataatctcatgaccaaaatcccttaacgtgagttttcgttccactgagcgtcagaccccgtagaaaagatcaaaggatcttcttgagatcctttttttctgcgcgtaatctgctgcttgcaaacaaaaaaaccaccgctaccagcggtggtttgtttgccggatcaagagctaccaactctttttccgaaggtaactggcttcagcagagcgcagataccaaatactgtccttctagtgtagccgtagttaggccaccacttcaagaactctgtagcaccgcctacatacctcgctctgctaatcctgttaccagtggctgctgccagtggcgataagtcgtgtcttaccgggttggactcaagacgatagttaccggataaggcgcagcggtcgggctgaacggggggttcgtgcacacagcccagcttggagcgaacgacctacaccgaactgagatacctacagcgtgagcattgagaaagcgccacgcttcccgaagggagaaaggcggacaggtatccggtaagcggcagggtcggaacaggagagcgcacgagggagcttccagggggaaacgcctggtatctttatagtcctgtcgggtttcgccacctctgacttgagcgtcgatttttgtgatgctcgtcaggggggcggagcctatggaaaaacgccagcaacgcgggcgcgccaggaatactctgaataaaacaacttatataataaaaatgc

SEQ ID NO: 562 - DNA, 7313 bp, Artificial Sequence
  Synthetic sequence
acaggcattgctgggatcacccatacatcactctgttttgcctgaccttttccggtaatttgaaaacaaacccggtctcgaagcggagatccggcgataattaccgcagaaataaacccatacacgagacgtagaaccagccgcacatggccggagaaactcctgcgagaatttcgtaaactcgcgcgcattgcatctgtatttcctaatgcggcacttccaggcctcgagacctctgacatgcttttgacaggaatagacattttcagaatgttatccatatgcctttcgggtttttttccttccttttccatcatgaaaaatctctcgagaccgtttatccattgcttttttgttgtctttttccctcgttcacagaaagtctgaagaagctatagtagaactatgagctttttttgtttctgttttccttttttttttttacctctgtggaaattgttactctcacactctttagttcgtttgtttgttttgtttattccaattatgaccggtgacgaaacgtggtcgatggtgggtaccgcttatgctcccctccattagtttcgattatataaaaaggccaaatattgtattattttcaaatgtcctatcattatcgtctaacatctaatttctcttaaattttttctctttctttcctataacaccaatagtgaaaatctttttttcttctatatctacaaaaactttttttttctatcaacctcgttgataaattttttctttaacaatcgttaataattaattaattggaaaataaccattttttctctcttttatacacacattcaaaagaaagaaaaaaaatataccccagctagttaaagaaaatcattgaaaagaataagaagataagaaagatttaattatcaaaaaacatgaagagcctagaaaatttattataaaaggaagagaaataattaaacagctcttctggcgccgctggctccgctgctggttctggcgaattcatgagtaaaggagaagaacttttcactggagttgtcccaattcttgttgaattagatggtgatgttaatgggcacaaattttctgtcagtggagagggtgaaggtgatgcaacatacggaaaacttacccttaaatttatttgcactactggaaaactacctgttccatggccaacacttgtcactactttcacttatggtgttcaatgcatttcaagatacccagatcatatgaaacggcatgactttttcaagagtgccatgcccgaaggttatgtacaggaaagaactatatttttcaaagatgacgggaactacaagacacgtgctgaagtcaagtttgaaggtgatacccttgttaatagaatcgagttaaaaggtattgattttaaagaagatggaaacattcttggacacaaattggaatacaactataactcacacaatgtatacatcatggcagacaaacaaaagaatggaatcaaagttaacttcaaaattagacacaacattgaagatggaagcgttcaactagcagaccattatcaacaaaatactccaattggcgatggccctgtccttttaccagacaaccattacctgtccacacaatctgccctttcgaaagatcccaacgaaaagagagaccacatggtccttcttgagtttgtaacagctgctgggattacacatggcatggatgaactatacaaataaggcgcctaagattaatataattatataaaaatattatcttcttttctttatatctagtgttatgtaaaataaattgatgactacggaaagcttttttatattgtttctttttcattctgagccacttaaatttcgtgaatgttcttataagggacggtagatttacaagtgatacaacaaaaagcaaggcgctttttctaataaaaagaagaaaagcatttaacaattgaacacctctatatcaacgaagaatattactttgtctctaaatccttgtaaaatgtgtacgatctctatatgggttactcagaagtgtaccgaagactgcattgaaagtttatgttttttcactgcaagcgtcattttcgctttgagaagatgttcttattcaaatttcaactgttatatagcctctttatattacatcaaaataagaaaataattataacacagatccgcggccgcataggccactagtggatctgatatcacctaataacttcgtatagcatacattatacgaagttatattaagggttctcgagagctcgttttcgacactggatggcggcgttagtatcgaatcgacagcagtatagcgaccagcattcacatacgattgacgcatgatattactttctgcgcacttaacttcgcatctgggcagatgatgtcgaggcgaaaaaaaatataaatcacgctaacatttgattaaaatagaacaactacaatataaaaaaactatacaaatgacaagttcttgaaaacaagaatctttttattgtcagtactgattagaaaaactcatcgagcatcaaatgaaactgcaatttattcatatcaggattatcaataccatatttttgaaaaagccgtttctgtaatgaaggagaaaactcaccgaggcagttccataggatggcaagatcctggtatcggtctgcgattccgactcgtccaacatcaatacaacctattaatttcccctcgtcaaaaataaggttatcaagtgagaaatcaccatgagtgacgactgaatccggtgagaatggcaaaagcttatgcatttctttccagacttgttcaacaggccagccattacgctcgtcatcaaaatcactcgcatcaaccaaaccgttattcattcgtgattgcgcctgagcgagacgaaatacgcgatcgctgttaaaaggacaattacaaacaggaatcgaatgcaaccggcgcaggaacactgccagcgcatcaacaatattttcacctgaatcaggatattcttctaatacctggaatgctgttttgccggggatcgcagtggtgagtaaccatgcatcatcaggagtacggataaaatgcttgatggtcggaagaggcataaattccgtcagccagtttagtctgaccatctcatctgtaacatcattggcaacgctacctttgccatgtttcagaaacaactctggcgcatcgggcttcccatacaatcgatagattgtcgcacctgattgcccgacattatcgcgagcccatttatacccatataaatcagcatccatgttggaatttaatcgcggcctcgaaacgtgagtcttttccttacccatggttgtttatgttcggatgtgatgtgagaactgtatcctagcaagattttaaaaggaagtatatgaaagaagaacctcagtggcaaatcctaaccttttatatttctctacaggggcgcggcgtggggacaattcaacgcgtctgtgaggggagcgtttccctgctcgcaggtctgcagcgaggagccgtaatttttgcttcgcgccgtgcggccatcaaaatgtatggatgcaaatgattatacatggggatgtatgggctaaatgtacgggcgacagtcacatcatgcccctgagctgcgcacgtcaagactgtcaaggagggtattctgggcctccatgtcgctggccgggtgacccggcggggacgaggcaagctaaacagatctctagacctaataacttcgtatagcatacattatacgaagttatattaagggttgtcgaggataagtgtgtaattaaagatcaaagccagtctaggtcatatgggtaataactgatataattaaattgaagctctaatttgtgagtttagtatacatgcatttacttataatacagttttttagttttgctggccgcatcttctcaaatatgcttcccagcctgcttttctgtaacgttcaccctctaccttagcatcccttccctttgcaaatagtcctcttccaacaataataatgtcagatcctgtagagaccacatcatccacggttctatactgttgacccaatgcgtctcccttgtcatctaaacccacaccgggtgtcataatcaaccaatcgtaaccttcatctcttccacccatgtctctttgagcaataaagccgataacaaaatctttgtcgctcttggcaatgtcaacagtacccttagtatattctccagtagatagggagcccttgcatgacaattctgctaacatcaaaaggcctctaggttcctttgttacttcttctgccgcctgcttcaaaccgctaacaatacctgggcccaccacaccgtgtgcattcgtaatgtctgcccattctgctattctgtatacacccgcagagtactgcaatttgactgtattaccaatgtcagcaaattttctgtcttcgaagagtaaaaaattgtacttggcggataatgcctttagcggcttaactgtgccctccatggaaaaatcagtcaagatatccacatgtgtttttagtaaacaaattttgggacctaatgcttcaactaactccagtaattccttggtggtacgaacatccaatgaagcacacaagtttgtttgcttttcgtgcatgatattaaatagcttggcagcaacaggactaggatgagtagcagcacgttccttatatgtagctttcgacatgatttatcttcgtttcctgcaggtttttgttctgtgcagttgggttaagaatactgggcaatttcatgtttcttcaacactacatatgcgtatatataccaatctaagtctgtgctccttccttcgttcttccttctgttcggagattaccgaatcaaaaaaatttcaaggaaaccgaaatcaaaaaaaagaataaaaaaaaaatgatgaatgtatctcatcatcaaaggcaccactcacgtcaggcaacagggacggatcgcttgcctgtaacttacacgcgcctcgtatcttttaatgatggaataatttgggaatttactctgtgtttatttatttttatgttttgtatttggattttagaaagtaaataaagaaggtagaagagttacggaatgaagaaaaaaaaataaacaaaggtttaaaaaatttcaacaaaaagcgtactttacatatatatttattagacaagaaaagcagattaaatagatatacattcgattaacgataagtaaaatgtaaaatcacaggattttcgtgtgtggtcttctacacagacaagatgaaacaattcggcattaatacctgagagcaggaagaggaagataaaaggtagtatttgttggcgatccccctagagtcttttacatcttcggaaaacaaaaactattttttctttaatttctttttttactttctatttttaatttatatatttatattaaaaaatttaaattataattatttttatagcacgtgatgaaaaggaccttaagacctattgcagacactcctactttaccgacgtcagcaggtggcacttttcggggaaatgtgcgcggaacccctatttgtttatttttctaaatacattcaaatatgtatccgctcatgagacaataaccctgataaatgcttcaataatattgaaaaaggaagagtatgagtattcaacatttccgtgtcgcccttattcccttttttgcggcattttgccttcctgtttttgctcacccagaaacgctggtgaaagtaaaagatgctgaagatcagttgggtgcacgagtgggttacatcgaactggatctcaacagcggtaagatccttgagagttttcgccccgaagaacgttttccaatgatgagcacttttaaagttctgctatgtggcgcggtattatcccgtattgacgccgggcaagagcaactcggtcgccgcatacactattctcagaatgacttggttgagtactcaccagtcacagaaaagcatcttacggatggcatgacagtaagagaattatgcagtgctgccataaccatgagtgataacactgcggccaacttacttctgacaacgatcggaggaccgaaggagctaaccgcttttttgcacaacatgggggatcatgtaactcgccttgatcgttgggaaccggagctgaatgaagccataccaaacgacgagcgtgacaccacgatgcctgtagcaatggcaacaacgttgcgcaaactattaactggcgaactacttactctagcttcccggcaacaattaatagactggatggaggcggataaagttgcaggaccacttctgcgctcggcccttccggctggctggtttattgctgataaatctggagccggtgagcgtgggtctcgcggtatcattgcagcactggggccagatggtaagccctcccgtatcgtagttatctacacgacggggagtcaggcaactatggatgaacgaaatagacagatcgctgagataggtgcctcactgattaagcattggtaactgtcagaccaagtttactcatatatactttagattgatttaaaacttcatttttaatttaaaaggatctaggtgaagatcctttttgataatctcatgaccaaaatcccttaacgtgagttttcgttccactgagcgtcagaccccgtagaaaagatcaaaggatcttcttgagatcctttttttctgcgcgtaatctgctgcttgcaaacaaaaaaaccaccgctaccagcggtggtttgtttgccggatcaagagctaccaactctttttccgaaggtaactggcttcagcagagcgcagataccaaatactgtccttctagtgtagccgtagttaggccaccacttcaagaactctgtagcaccgcctacatacctcgctctgctaatcctgttaccagtggctgctgccagtggcgataagtcgtgtcttaccgggttggactcaagacgatagttaccggataaggcgcagcggtcgggctgaacggggggttcgtgcacacagcccagcttggagcgaacgacctacaccgaactgagatacctacagcgtgagcattgagaaagcgccacgcttcccgaagggagaaaggcggacaggtatccggtaagcggcagggtcggaacaggagagcgcacgagggagcttccagggggaaacgcctggtatctttatagtcctgtcgggtttcgccacctctgacttgagcgtcgatttttgtgatgctcgtcaggggggcggagcctatggaaaaacgccagcaacgcgggcgcgccaggaatactctgaataaaacaacttatataataaaaatgc

SEQ ID NO: 563 - DNA, 6974 bp, Artificial Sequence
  Synthetic sequence
ggacttttaattttcgaggaccgcgaatccttacatcacacccaatcccccacaagtgatcccccacacaccatagcttcaaaatgtttctactccttttttactcttccagattttctcggactccgcgcatcgccgtaccacttcaaaacacccaagcacagcatactaaatttcccctctttcttcctctagggtgtcgttaattacccgtactaaaggtttggaaaagaaaaaagagaccgcctcgtttctttttcttcgtcgaaaaaggcaataaaaatttttatcacgtttctttttcttgaaaatttttttttttgatttttttctctttcgatgacctcccattgatatttaagttaataaacggtcttcaatttctcaagtttcagtttcatttttcttgttctattacaactttttttacttcttgctcattagaaagaaagcatagcaatctaatctaagttttaataaacatgaagagcctagaaaatttattataaaaggaagagaaataattaaacagctcttctggcgccgctggctccgctgctggttctggcgaattcatgagtaaaggagaagaacttttcactggagttgtcccaattcttgttgaattagatggtgatgttaatgggcacaaattttctgtcagtggagagggtgaaggtgatgcaacatacggaaaacttacccttaaatttatttgcactactggaaaactacctgttccatggccaacacttgtcactactttcacttatggtgttcaatgcatttcaagatacccagatcatatgaaacggcatgactttttcaagagtgccatgcccgaaggttatgtacaggaaagaactatatttttcaaagatgacgggaactacaagacacgtgctgaagtcaagtttgaaggtgatacccttgttaatagaatcgagttaaaaggtattgattttaaagaagatggaaacattcttggacacaaattggaatacaactataactcacacaatgtatacatcatggcagacaaacaaaagaatggaatcaaagttaacttcaaaattagacacaacattgaagatggaagcgttcaactagcagaccattatcaacaaaatactccaattggcgatggccctgtccttttaccagacaaccattacctgtccacacaatctgccctttcgaaagatcccaacgaaaagagagaccacatggtccttcttgagtttgtaacagctgctgggattacacatggcatggatgaactatacaaataaggcgcctaaaacaaatcgctcttaaattatacctaaagaacattaaagctatattataagcaaagatacgtaaattttgcttatattattatacacatatcatatttctatatttttaagatttggttatataatgtacgtaatgcaaaggaaataaattttatacattattgaacagcgtccaagtaactacattatgtgcactaatagtttagcgtcgtgaagactttattgtgtcgcgaaaagtaaaaattttaaaaattagagcaccttgaacttgcgaaaaaggttctcatcaactgtttaaaaggaggatatcaggtcctatttctgacaaacaatatacaaatttagtttcaaagatgaatcagtgcgcgaaggacataactcatgaagcctccagtatacccctctttatattacatcaaaataagaaaataattataacacagatccgcggccgcataggccactagtggatctgatatcacctaataacttcgtatagcatacattatacgaagttatattaagggttctcgagagctcgttttcgacactggatggcggcgttagtatcgaatcgacagcagtatagcgaccagcattcacatacgattgacgcatgatattactttctgcgcacttaacttcgcatctgggcagatgatgtcgaggcgaaaaaaaatataaatcacgctaacatttgattaaaatagaacaactacaatataaaaaaactatacaaatgacaagttcttgaaaacaagaatctttttattgtcagtactgattagaaaaactcatcgagcatcaaatgaaactgcaatttattcatatcaggattatcaataccatatttttgaaaaagccgtttctgtaatgaaggagaaaactcaccgaggcagttccataggatggcaagatcctggtatcggtctgcgattccgactcgtccaacatcaatacaacctattaatttcccctcgtcaaaaataaggttatcaagtgagaaatcaccatgagtgacgactgaatccggtgagaatggcaaaagcttatgcatttctttccagacttgttcaacaggccagccattacgctcgtcatcaaaatcactcgcatcaaccaaaccgttattcattcgtgattgcgcctgagcgagacgaaatacgcgatcgctgttaaaaggacaattacaaacaggaatcgaatgcaaccggcgcaggaacactgccagcgcatcaacaatattttcacctgaatcaggatattcttctaatacctggaatgctgttttgccggggatcgcagtggtgagtaaccatgcatcatcaggagtacggataaaatgcttgatggtcggaagaggcataaattccgtcagccagtttagtctgaccatctcatctgtaacatcattggcaacgctacctttgccatgtttcagaaacaactctggcgcatcgggcttcccatacaatcgatagattgtcgcacctgattgcccgacattatcgcgagcccatttatacccatataaatcagcatccatgttggaatttaatcgcggcctcgaaacgtgagtcttttccttacccatggttgtttatgttcggatgtgatgtgagaactgtatcctagcaagattttaaaaggaagtatatgaaagaagaacctcagtggcaaatcctaaccttttatatttctctacaggggcgcggcgtggggacaattcaacgcgtctgtgaggggagcgtttccctgctcgcaggtctgcagcgaggagccgtaatttttgcttcgcgccgtgcggccatcaaaatgtatggatgcaaatgattatacatggggatgtatgggctaaatgtacgggcgacagtcacatcatgcccctgagctgcgcacgtcaagactgtcaaggagggtattctgggcctccatgtcgctggccgggtgacccggcggggacgaggcaagctaaacagatctctagacctaataacttcgtatagcatacattatacgaagttatattaagggttgtcgaggataagtgtgtaattaaagatcaaagccagtctaggtcatatgcgtcgagttcaagagaaaaaaaaagaaaaagcaaaaagaaaaaaggaaagcgcgcctcgttcagaatgacacgtatagaatgatgcattaccttgtcatcttcagtatcatactgttcgtatacatacttactgacattcataggtatacatatatacacatgtatatatatcgtatgctgcagctttaaataatcggtgtcactacataagaacacctttggtggagggaacatcgttggtgccattgggcgaggtggcttctcttatggcaaccgcaagagccttgaacgcactctcactacggtgatgatcattcttgcctcgcagacaatcaacgtggagggtaattctgctagcctctgcaaagctttcaagaaaatgcgggatcatctcgcaagagagatctcctactttctccctttgcaaaccaagttcgacaactgcgtacggcctgttcgaaagatctaccaccgctctggaaagtgcctcatccaaaggcgcaaatcctgatccaaacctttttactccacgcgccagtagggcctctttaaaagcttgaccgagagcaatcccgcagtcttcagtggtgtgatggtcgtctatgtgtaagtcaccaatgcactcaacgattagcgaccagccggaatgcttggccagagcatgtatcatatggtccagaaaccctatacctgtgtggacgttaatcacttgcgattgtgtggcctgttctgctactgcttctgcctctttttctgggaagatcgagtgctctatcgctaggggaccaccctttaaagagatcgcaatctgaatcttggtttcatttgtaatacgctttactagggctttctgctctgtcatctttgccttcgtttatcttgcctgctcattttttagtatattcttcgaagaaatcacattactttatataatgtataattcattatgtgataatgccaatcgctaagaaaaaaaaagagtcatccgctaggtggaaaaaaaaaaatgaaaatcattaccgaggcataaaaaaatatagagtgtactagaggaggccaagagtaatagaaaaagaaaattgcgggaaaggactgtgttatgacttccctgactaatgccgtgttcaaacgatacctggcagtgactcctagcgctcaccaagctcttaaaacggtatctcatcatcaaaggcaccactcacgtcaggcaacagggacggatcgcttgcctgtaacttacacgcgcctcgtatcttttaatgatggaataatttgggaatttactctgtgtttatttatttttatgttttgtatttggattttagaaagtaaataaagaaggtagaagagttacggaatgaagaaaaaaaaataaacaaaggtttaaaaaatttcaacaaaaagcgtactttacatatatatttattagacaagaaaagcagattaaatagatatacattcgattaacgataagtaaaatgtaaaatcacaggattttcgtgtgtggtcttctacacagacaagatgaaacaattcggcattaatacctgagagcaggaagaggaagataaaaggtagtatttgttggcgatccccctagagtcttttacatcttcggaaaacaaaaactattttttctttaatttctttttttactttctatttttaatttatatatttatattaaaaaatttaaattataattatttttatagcacgtgatgaaaaggaccttaagacctattgcagacactcctactttaccgacgtcagcaggtggcacttttcggggaaatgtgcgcggaacccctatttgtttatttttctaaatacattcaaatatgtatccgctcatgagacaataaccctgataaatgcttcaataatattgaaaaaggaagagtatgagtattcaacatttccgtgtcgcccttattcccttttttgcggcattttgccttcctgtttttgctcacccagaaacgctggtgaaagtaaaagatgctgaagatcagttgggtgcacgagtgggttacatcgaactggatctcaacagcggtaagatccttgagagttttcgccccgaagaacgttttccaatgatgagcacttttaaagttctgctatgtggcgcggtattatcccgtattgacgccgggcaagagcaactcggtcgccgcatacactattctcagaatgacttggttgagtactcaccagtcacagaaaagcatcttacggatggcatgacagtaagagaattatgcagtgctgccataaccatgagtgataacactgcggccaacttacttctgacaacgatcggaggaccgaaggagctaaccgcttttttgcacaacatgggggatcatgtaactcgccttgatcgttgggaaccggagctgaatgaagccataccaaacgacgagcgtgacaccacgatgcctgtagcaatggcaacaacgttgcgcaaactattaactggcgaactacttactctagcttcccggcaacaattaatagactggatggaggcggataaagttgcaggaccacttctgcgctcggcccttccggctggctggtttattgctgataaatctggagccggtgagcgtgggtctcgcggtatcattgcagcactggggccagatggtaagccctcccgtatcgtagttatctacacgacggggagtcaggcaactatggatgaacgaaatagacagatcgctgagataggtgcctcactgattaagcattggtaactgtcagaccaagtttactcatatatactttagattgatttaaaacttcatttttaatttaaaaggatctaggtgaagatcctttttgataatctcatgaccaaaatcccttaacgtgagttttcgttccactgagcgtcagaccccgtagaaaagatcaaaggatcttcttgagatcctttttttctgcgcgtaatctgctgcttgcaaacaaaaaaaccaccgctaccagcggtggtttgtttgccggatcaagagctaccaactctttttccgaaggtaactggcttcagcagagcgcagataccaaatactgtccttctagtgtagccgtagttaggccaccacttcaagaactctgtagcaccgcctacatacctcgctctgctaatcctgttaccagtggctgctgccagtggcgataagtcgtgtcttaccgggttggactcaagacgatagttaccggataaggcgcagcggtcgggctgaacggggggttcgtgcacacagcccagcttggagcgaacgacctacaccgaactgagatacctacagcgtgagcattgagaaagcgccacgcttcccgaagggagaaaggcggacaggtatccggtaagcggcagggtcggaacaggagagcgcacgagggagcttccagggggaaacgcctggtatctttatagtcctgtcgggtttcgccacctctgacttgagcgtcgatttttgtgatgctcgtcaggggggcggagcctatggaaaaacgccagcaacgcgggcgcgccaggaatactctgaataaaacaacttatataataaaaatgc

SEQ ID NO: 564 - DNA, 9338 bp, Artificial Sequence
  Synthetic sequence
atccaactggcaccgctggcttgaacaacaataccagccttccaacttctgtaaataacggcggtacgccagtgccaccagtaccgttacctttcggtatacctcctttccccatgtttccaatgcccttcatgcctccaacggctactatcacaaatcctcatcaagctgacgcaagccctaagaaatgaataacaatactgacagtactaaataattgcctacttggcttcacatacgttgcatacgtcgatatagataataatgataatgacagcaggattatcgtaatacgtaatagttgaaaatctcaaaaatgtgtgggtcattacgtaaataatgataggaatgggattcttctatttttcctttttccattctagcagccgtcgggaaaacgtggcatcctctctttcgggctcaattggagtcacgctgccgtgagcatcctctctttccatatctaacaactgagcacgtaaccaatggaaaagcatgagcttagcgttgctccaaaaaagtattggatggttaataccatttgtctgttctcttctgactttgactcctcaaaaaaaaaaaatctacaatcaacagatcgcttcaattacgccctcacaaaaacttttttccttcttcttcgcccacgttaaattttatccctcatgttgtctaacggatttctgcacttgatttattataaaaagacaaagacataatacttctctatcaatttcagttattgttcttccttgcgttattcttctgttcttctttttcttttgtcatatataaccataaccaagtaatacataaaacaatggaagcctcttacctatacatttctattttgcttttactggcatcatacctgttcaccactcaacttagaaggaagagcgctaatctaccaccaaccgtgtttccatcaataccaatcattggacacttatacttactcaaaaagcctctttatagaactttagcaaaaattgccgctaagtacggaccaatactgcaattacaactcggctacagacgtgttctggtgatttcctcaccatcagcagcagaagagtgctttaccaataacgatgtaatcttcgcaaatagacctaagacattgtttggcaaaatagtgggtggaacatcccttggcagtttatcctacggcgatcaatggcgtaatctaaggagagtagcttctatcgaaatcctatcagttcataggttgaacgaatttcatgatatcagagtggatgagaacagattgttaattagaaaacttagaagttcatcttctcctgttactcttataacagtcttttatgctctaacattgaacgtcattatgagaatgatctctggcaaaagatatttcgacagtggggatagagaattggaggaggaaggtaagagatttcgagaaatcttagacgaaacgttgcttctagccggtgcttctaatgttggcgactacttaccaatattgaactggttgggagttaagtctcttgaaaagaaattgatcgctttgcagaaaaagagagatgactttttccagggtttgattgaacaggttagaaaatctcgtggtgctaaagtaggcaaaggtagaaaaacgatgatcgaactcttattatctttgcaagagtcagaacctgagtactatacagatgctatgataagatcttttgtcctaggtctgctggctgcaggtagtgatacttcagcgggcactatggaatgggccatgagcttactggtcaatcacccacatgtattgaagaaagctcaagctgaaatcgatagagttatcggtaataacagattgattgacgagtcagacattggaaatatcccttacatcgggtgtattatcaatgaaactctaagactctatccagcagggccattgttgttcccacatgaaagttctgccgactgcgttatttccggttacaatatacctagaggtacaatgttaatcgtaaaccaatgggcgattcatcacgatcctaaagtctgggatgatcctgaaacctttaaacctgaaagatttcaaggattagaaggaactagagatggtttcaaacttatgccattcggttctgggagaagaggatgtccaggtgaaggtttggcaataaggctgttagggatgacactaggctcagtgatccaatgttttgattgggagagagtaggagatgagatggttgacatgacagaaggtttgggtgtcacacttcctaaggccgttccattagttgccaaatgtaagccacgttccgaaatgactaatctcctatccgaacttggcgccgctggctccgctgctggttctggcgaattcatgagtaaaggagaagaacttttcactggagttgtcccaattcttgttgaattagatggtgatgttaatgggcacaaattttctgtcagtggagagggtgaaggtgatgcaacatacggaaaacttacccttaaatttatttgcactactggaaaactacctgttccatggccaacacttgtcactactttcacttatggtgttcaatgcatttcaagatacccagatcatatgaaacggcatgactttttcaagagtgccatgcccgaaggttatgtacaggaaagaactatatttttcaaagatgacgggaactacaagacacgtgctgaagtcaagtttgaaggtgatacccttgttaatagaatcgagttaaaaggtattgattttaaagaagatggaaacattcttggacacaaattggaatacaactataactcacacaatgtatacatcatggcagacaaacaaaagaatggaatcaaagttaacttcaaaattagacacaacattgaagatggaagcgttcaactagcagaccattatcaacaaaatactccaattggcgatggccctgtccttttaccagacaaccattacctgtccacacaatctgccctttcgaaagatcccaacgaaaagagagaccacatggtccttcttgagtttgtaacagctgctgggattacacatggcatggatgaactatacaaataaggcgcctaatggacttcttcgccagaggtttggtcaagtctccaatcaaggttgttggcttgtctaccttgccagaaatttacgaaaagatggaaaagggtcaaatcgttggtagatacgttgttgacacttctaaataagcgaatttcttatgatttatgatttttattattaaataagttataaaaaaaataagtgtatacaaattttaaagtgactcttaggttttaaaacgaaaattcttattcttgagtaactctttcctgtaggtcaggttgctttctcaggtatagcatgaggtcgctcttattgaccacacctctaccggcatgccctctttatattacatcaaaataagaaaataattataacacagatccgcggccgcataggccactagtggatctgatatcacctaataacttcgtatagcatacattatacgaagttatattaagggttctcgagagctcgttttcgacactggatggcggcgttagtatcgaatcgacagcagtatagcgaccagcattcacatacgattgacgcatgatattactttctgcgcacttaacttcgcatctgggcagatgatgtcgaggcgaaaaaaaatataaatcacgctaacatttgattaaaatagaacaactacaatataaaaaaactatacaaatgacaagttcttgaaaacaagaatctttttattgtcagtactgattagaaaaactcatcgagcatcaaatgaaactgcaatttattcatatcaggattatcaataccatatttttgaaaaagccgtttctgtaatgaaggagaaaactcaccgaggcagttccataggatggcaagatcctggtatcggtctgcgattccgactcgtccaacatcaatacaacctattaatttcccctcgtcaaaaataaggttatcaagtgagaaatcaccatgagtgacgactgaatccggtgagaatggcaaaagcttatgcatttctttccagacttgttcaacaggccagccattacgctcgtcatcaaaatcactcgcatcaaccaaaccgttattcattcgtgattgcgcctgagcgagacgaaatacgcgatcgctgttaaaaggacaattacaaacaggaatcgaatgcaaccggcgcaggaacactgccagcgcatcaacaatattttcacctgaatcaggatattcttctaatacctggaatgctgttttgccggggatcgcagtggtgagtaaccatgcatcatcaggagtacggataaaatgcttgatggtcggaagaggcataaattccgtcagccagtttagtctgaccatctcatctgtaacatcattggcaacgctacctttgccatgtttcagaaacaactctggcgcatcgggcttcccatacaatcgatagattgtcgcacctgattgcccgacattatcgcgagcccatttatacccatataaatcagcatccatgttggaatttaatcgcggcctcgaaacgtgagtcttttccttacccatggttgtttatgttcggatgtgatgtgagaactgtatcctagcaagattttaaaaggaagtatatgaaagaagaacctcagtggcaaatcctaaccttttatatttctctacaggggcgcggcgtggggacaattcaacgcgtctgtgaggggagcgtttccctgctcgcaggtctgcagcgaggagccgtaatttttgcttcgcgccgtgcggccatcaaaatgtatggatgcaaatgattatacatggggatgtatgggctaaatgtacgggcgacagtcacatcatgcccctgagctgcgcacgtcaagactgtcaaggagggtattctgggcctccatgtcgctggccgggtgacccggcggggacgaggcaagctaaacagatctctagacctaataacttcgtatagcatacattatacgaagttatattaagggttgtcgaggataagtgtgtaattaaagatcaaagccagtctaggtcatatgcctgattcaagaaatatcttgaccgcagttaactgtgggaatactcaggtatcgtaagatgcaagagttcgaatctcttagcaaccattatttttttcctcaacataacgagaacacacaggggcgctatcgcacagaatcaaattcgatgactggaaattttttgttaatttcagaggtcgcctgacgcatatacctttttcaactgaaaaattgggagaaaaaggaaaggtgagaggccggaaccggcttttcatatagaatagagaagcgttcatgactaaatgcttgcatcacaatacttgaagttgacaatattatttaaggacctattgttttttccaataggtggttagcaatcgtcttactttctaacttttcttaccttttacatttcagcaatatatatatatatttcaaggatataccattctaatgtctgcccctatgtctgcccctaagaagatcgtcgttttgccaggtgaccacgttggtcaagaaatcacagccgaagccattaaggttcttaaagctatttctgatgttcgttccaatgtcaagttcgatttcgaaaatcatttaattggtggtgctgctatcgatgctacaggtgtcccacttccagatgaggcgctggaagcctccaagaaggttgatgccgttttgttaggtgctgtgggtggtcctaaatggggtaccggtagtgttagacctgaacaaggtttactaaaaatccgtaaagaacttcaattgtacgccaacttaagaccatgtaactttgcatccgactctcttttagacttatctccaatcaagccacaatttgctaaaggtactgacttcgttgttgtcagagaattagtgggaggtatttactttggtaagagaaaggaagacgatggtgatggtgtcgcttgggatagtgaacaatacaccgttccagaagtgcaaagaatcacaagaatggccgctttcatggccctacaacatgagccaccattgcctatttggtccttggataaagctaatgttttggcctcttcaagattatggagaaaaactgtggaggaaaccatcaagaacgaattccctacattgaaggttcaacatcaattgattgattctgccgccatgatcctagttaagaacccaacccacctaaatggtattataatcaccagcaacatgtttggtgatatcatctccgatgaagcctccgttatcccaggttccttgggtttgttgccatctgcgtccttggcctctttgccagacaagaacaccgcatttggtttgtacgaaccatgccacggttctgctccagatttgccaaagaataaggttgaccctatcgccactatcttgtctgctgcaatgatgttgaaattgtcattgaacttgcctgaagaaggtaaggccattgaagatgcagttaaaaaggttttggatgcaggtatcagaactggtgatttaggtggttccaacagtaccaccgaagtcggtgatgctgtcgccgaagaagttaagaaaatccttgcttaaaaagattctctttttttatgatatttgtacataaactttataaatgaaattcataatagaaacgacacgaaattacaaaatggaatatgttcatagggtagacgaaactatatacgcaatctacatacatttatcaagaaggagaaaaaggaggatgtaaaggaatacaggtaagcaaattgatactaatggctcaacgtgataaggaaaaagaattgcactttaacattaatattgacaaggaggagggcaccacacaaaaagttaggtgtaacagaaaatcatgaaactagtatctcatcatcaaaggcaccactcacgtcaggcaacagggacggatcgcttgcctgtaacttacacgcgcctcgtatcttttaatgatggaataatttgggaatttactctgtgtttatttatttttatgttttgtatttggattttagaaagtaaataaagaaggtagaagagttacggaatgaagaaaaaaaaataaacaaaggtttaaaaaatttcaacaaaaagcgtactttacatatatatttattagacaagaaaagcagattaaatagatatacattcgattaacgataagtaaaatgtaaaatcacaggattttcgtgtgtggtcttctacacagacaagatgaaacaattcggcattaatacctgagagcaggaagaggaagataaaaggtagtatttgttggcgatccccctagagtcttttacatcttcggaaaacaaaaactattttttctttaatttctttttttactttctatttttaatttatatatttatattaaaaaatttaaattataattatttttatagcacgtgatgaaaaggaccttaagacctattgcagacactcctactttaccgacgtcagcaggtggcacttttcggggaaatgtgcgcggaacccctatttgtttatttttctaaatacattcaaatatgtatccgctcatgagacaataaccctgataaatgcttcaataatattgaaaaaggaagagtatgagtattcaacatttccgtgtcgcccttattcccttttttgcggcattttgccttcctgtttttgctcacccagaaacgctggtgaaagtaaaagatgctgaagatcagttgggtgcacgagtgggttacatcgaactggatctcaacagcggtaagatccttgagagttttcgccccgaagaacgttttccaatgatgagcacttttaaagttctgctatgtggcgcggtattatcccgtattgacgccgggcaagagcaactcggtcgccgcatacactattctcagaatgacttggttgagtactcaccagtcacagaaaagcatcttacggatggcatgacagtaagagaattatgcagtgctgccataaccatgagtgataacactgcggccaacttacttctgacaacgatcggaggaccgaaggagctaaccgcttttttgcacaacatgggggatcatgtaactcgccttgatcgttgggaaccggagctgaatgaagccataccaaacgacgagcgtgacaccacgatgcctgtagcaatggcaacaacgttgcgcaaactattaactggcgaactacttactctagcttcccggcaacaattaatagactggatggaggcggataaagttgcaggaccacttctgcgctcggcccttccggctggctggtttattgctgataaatctggagccggtgagcgtgggtctcgcggtatcattgcagcactggggccagatggtaagccctcccgtatcgtagttatctacacgacggggagtcaggcaactatggatgaacgaaatagacagatcgctgagataggtgcctcactgattaagcattggtaactgtcagaccaagtttactcatatatactttagattgatttaaaacttcatttttaatttaaaaggatctaggtgaagatcctttttgataatctcatgaccaaaatcccttaacgtgagttttcgttccactgagcgtcagaccccgtagaaaagatcaaaggatcttcttgagatcctttttttctgcgcgtaatctgctgcttgcaaacaaaaaaaccaccgctaccagcggtggtttgtttgccggatcaagagctaccaactctttttccgaaggtaactggcttcagcagagcgcagataccaaatactgtccttctagtgtagccgtagttaggccaccacttcaagaactctgtagcaccgcctacatacctcgctctgctaatcctgttaccagtggctgctgccagtggcgataagtcgtgtcttaccgggttggactcaagacgatagttaccggataaggcgcagcggtcgggctgaacggggggttcgtgcacacagcccagcttggagcgaacgacctacaccgaactgagatacctacagcgtgagcattgagaaagcgccacgcttcccgaagggagaaaggcggacaggtatccggtaagcggcagggtcggaacaggagagcgcacgagggagcttccagggggaaacgcctggtatctttatagtcctgtcgggtttcgccacctctgacttgagcgtcgatttttgtgatgctcgtcaggggggcggagcctatggaaaaacgccagcaacgcgggcgcgccaggaatactctgaataaaacaacttatataataaaaatgc

SEQ ID NO: 565 - DNA, 11 bp, Artificial Sequence
  Synthetic sequence
gctcttctaca

SEQ ID NO: 566 - DNA, 11 bp, Artificial Sequence
  Synthetic sequence
ggctgaagagc

SEQ ID NO: 567 - DNA, 5 bp, Artificial Sequence
  Synthetic sequence
aaaca

SEQ ID NO: 568 - DNA, 27 bp, Artificial Sequence
  Synthetic sequence
aaacatgaagagcgctcttctggcgcc

SEQ ID NO: 569 - DNA, 27 bp, Artificial Sequence
  Synthetic sequence
tttgtacttctcgcgagaagaccgcgg

SEQ ID NO: 570 - DNA, 22 bp, Artificial Sequence
  Synthetic sequence
gctcttctacaggctgaagagc

SEQ ID NO: 571 - DNA, 22 bp, Artificial Sequence
  Synthetic sequence
cgagaagatgtccgacttctcg

SEQ ID NO: 572 - DNA, 14 bp, Artificial Sequence
  Synthetic sequence
aaacaatgggcgcc

SEQ ID NO: 573 - DNA, 14 bp, Artificial Sequence
  Synthetic sequence
tttgttacccgcgg

1. A method of preparing a benzylisoquinoline alkaloid (BIA) metabolite comprising:
(a) culturing a host cell under conditions suitable for protein production, including a first fermentation at a pH of between about 7 and about 10, and, optionally followed by a second fermentation at a pH between about 3 and about 6, said host cell comprising:
a. a first heterologous coding sequence encoding a first enzyme involved in a metabolite pathway that converts (R,S)-norlaudanosoline into the metabolite;
b. a second heterologous coding sequence encoding a second enzyme involved in a metabolite pathway that converts (R,S)-norlaudanosoline into the metabolite; and
c. a third heterologous coding sequence encoding a third enzyme involved in a metabolite pathway that converts (R,S)-norlaudanosoline into the metabolite;
(b) adding a substrate that is (R,S)-norlaudanosoline, (R,S)-reticuline or (S)-stylopine, to the cell culture; and
(c) recovering the metabolite from the cell culture.

2. The method of claim 1, wherein the host cell is a yeast cell, preferably wherein the yeast is Saccharomyces, preferably the Saccharomyces is Saccharomyces cerevisiae.

3. (canceled)

4. (canceled)

5. The method of claim 1, wherein the substrate is (R,S)-norlaudanosoline and the metabolite is (S)-reticuline,
preferably wherein:
a. the first enzyme is 6-O-methyltransferase (6OMT);
b. the second enzyme is coclaurine N-methyltransferase (CNMT); and/or
c. the third enzyme is 4′-O-methyltransferase 2 (4′OMT2),
more preferably wherein:
a. the 6OMT is as set forth in any one of the sequences as depicted in FIG. 14A or 15A;
b. the CNMT is as set forth in any one of the sequences as depicted in FIG. 14B or 15B; and/or
c. the 4′OMT2 is as set forth in any one of the sequences as depicted in FIG. 14C or 15C,
even more preferably wherein:
a. 6OMT is from Papaver somniferum;
b. CNMT is from Papaver somniferum; and/or
c. 4′OMT2 is from Papaver somniferum,
more particularly wherein:
a. Ps6OMT is as set forth in SEQ ID NO: 34 (FIG. 13);
b. PsCNMT is as set forth in SEQ ID NO: 38 (FIG. 13); and/or
c. Ps4′OMT2 is as set forth in SEQ ID NO: 42 (FIG. 13).

6. (canceled)

7. (canceled)

8. (canceled)

9. (canceled)

10. The method of claim 5, wherein the cell further comprises a fourth heterologous coding sequence encoding a fourth enzyme involved in a metabolite pathway that converts (R,S)-norlaudanosoline into the metabolite, preferably wherein the metabolite is (S)-scoulerine.

11. (canceled)

12. The method of claim 10, wherein the fourth enzyme is berberine bridge enzyme (BBE), preferably wherein the BBE is as set forth in any one of the sequences as depicted in FIG. 14D or 15D, more preferably wherein BBE is from Papaver somniferum (Ps).

13. (canceled)

14. (canceled)

15. The method of claim 12, wherein the amino acid N-terminal membrane-spanning domain from PsBBE was truncated (PsBBEΔN), preferably wherein PsBBEΔN is as set forth in SEQ ID NO: 46 (FIG. 13).

16. (canceled)

17. The method of claim 10, wherein the cell further comprises a fifth heterologous coding sequence encoding a fifth enzyme involved in a metabolite pathway that converts (R,S)-norlaudanosoline into the metabolite, preferably wherein the metabolite is nandinine or (S)-cheilanthifoline.

18. (canceled)

19. The method of claim 17, wherein the fifth enzyme is a Ring B closer able to transform scoulerine into cheilanthifoline, preferably wherein the Ring B closer is as set forth in any one of the sequences depicted in FIG. 17A-C, more preferably wherein the Ring B closer is further able to transform nandinine into stylopine, particularly wherein the Ring B closer is as set forth in any one of the sequences depicted in FIG. 17B-C, even more particularly wherein the Ring B closer is as set forth in any one of the sequences depicted in FIG. 17C.

20. (canceled)

21. (canceled)

22. (canceled)

23. (canceled)

24. The method of claim 19, wherein the fifth enzyme is cheilanthifoline synthase (CFS), preferably wherein the CFS is as set forth in any one of the sequences as depicted in FIG. 14E or 15E, more preferably wherein CFS is from Papaver somniferum (Ps), more particularly wherein PsCFS is as set forth in FIG. 13 (SEQ ID NO: 50 or 52).

25. (canceled)

26. (canceled)

27. (canceled)

28. The method of claim 17, wherein the cell further comprises a sixth heterologous coding sequence encoding a sixth enzyme involved in a metabolite pathway that converts (R,S)-norlaudanosoline into the metabolite, preferably wherein the metabolite is (S)-stylopine.

29. (canceled)

30. The method of claim 28, wherein the sixth enzyme is a Ring A closer able to transform cheilanthifoline into (S)-stylopine, preferably wherein the Ring A closer is as set forth in any one of the sequences depicted in FIG. 17D-E, more particularly wherein Ring A closer is further able to transform scoulerine into nandinine, particularly wherein the Ring A closer is as set forth in any one of the sequences depicted in FIG. 17E.

31. (canceled)

32. (canceled)

33. (canceled)

34. The method of claim 30, wherein the Ring B closer is (i) as set forth in SEQ ID NO: 485 and the Ring A closer is as set forth in SEQ ID NO: 487; (or) as set forth in SEQ ID NO: 333; or SEQ ID NO: 377 and the Ring A closer is as set forth in SEQ ID NO: 321, SEQ ID NO: 335, SEQ ID NO: 346, SEQ ID NO: 355, SEQ ID NO: or SEQ ID NO: 380.

35. (canceled)

36. The method of claim 28, wherein the sixth enzyme is stylopine syntase (SPS), preferably wherein the SPS is as set forth in any one of the sequences as depicted in FIG. 14F or 15F, more preferably wherein SPS is from Papaver somniferum (Ps).

37. (canceled)

38. (canceled)

39. The method of claim 28, wherein the method comprises the second fermentation and wherein the cell further comprises a seventh heterologous coding sequence encoding a seventh enzyme involved in a metabolite pathway that converts (R,S)-norlaudanosoline into the metabolite, preferably wherein the metabolite is (S)—N-cis-methylstylopine.

40. (canceled)

41. The method of claim 39, wherein the seventh enzyme is tetrahydroprotoberberine cis-N-methyltransferase (TNMT), preferably wherein the TNMT is as set forth in any one of the sequences as depicted in FIG. 14G or 14G, more preferably wherein TNMT is from Papaver somniferum (Ps), particularly wherein PsTNMT is as set forth in SEQ ID NO: 58 (FIG. 13).

42. (canceled)

43. (canceled)

44. (canceled)

45. The method of claim 39, wherein the cell further comprises a eight heterologous coding sequence encoding a eight enzyme involved in a metabolite pathway that converts (R,S)-norlaudanosoline into the metabolite, preferably wherein the metabolite is protopine.

46. (canceled)

47. The method of claim 45, wherein the eighth enzyme is (S)-cis-N-methylstylopine 14-hydroxylase (MSH), preferably wherein the MSH is as set forth in any one of the sequences as depicted in FIG. 14H or 14H, more preferably wherein MSH is from Papaver somniferum (Ps).

48. (canceled)

49. (canceled)

50. The method of claim 45, wherein the cell further comprises a ninth heterologous coding sequence encoding a ninth enzyme involved in a metabolite pathway that converts (R,S)-norlaudanosoline into the metabolite, preferably wherein the metabolite is 6-hydroxyprotopine.

51. (canceled)

52. The method of claim 50, wherein the ninth enzyme is protopine 6-hydroxylase (P6H), preferably wherein the P6H is as set forth in any one of the sequences as depicted in FIG. 14I or 14I, more preferably wherein P6H is from Eschscholzia californica (Ec), particularly wherein EcP6H is as set forth in SEQ ID NO: 62 (FIG. 13).

53. (canceled)

54. (canceled)

55. (canceled)

56. The method of claim 50, wherein the cell further comprises a tenth heterologous coding sequence encoding a tenth enzyme involved in a metabolite pathway that converts (R,S)-norlaudanosoline into the metabolite.

57. The method of claim 56, wherein the tenth enzyme is cytochrome P450 reductase (CPR), preferably wherein the CPR is as set forth in any one of the sequences as depicted in FIG. 14J or 14J, more preferably wherein CPR is from Papaver somniferum (Ps), particularly wherein PsCPR is as set forth in SEQ ID NO: 66 (FIG. 13).

58. (canceled)

59. (canceled)

60. (canceled)

61. The method of claim 57, wherein (i) 6OMT, CNMT and 4′OMT2 are expressed from a plasmid; and/or (ii) BBE and CPR are expressed from a plasmid and CFS, SPS, TNMT, MSH and P6H are expressed from a chromosome.

62. (canceled)

63. The method of claim 1, wherein the substrate is (R,S)-reticuline and the metabolite is (S)-stylopine, preferably wherein:
a. the first enzyme is berberine bridge enzyme (BBE);
b. the second enzyme is cheilanthifoline synthase (CFS) or a Ring B closer able to transform scoulerine into cheilanthifoline;
c. the third enzyme is stylopine syntase (SPS) or a Ring A closer able to transform cheilanthifoline into (S)-stylopine; and/or
d. the fourth enzyme is cytochrome P450 reductase (CPR),
more preferably wherein:
a. the BBE is as set forth in any one of the sequences as depicted in FIG. 14D or 15D;
b. the CFS is as set forth in any one of the sequences as depicted in FIG. 14E or 15E or the Ring B closer is as set forth in any one of the sequences depiced in 17A-C;
c. the SPS is as set forth in any one of the sequences as depicted in FIG. 14F or 15F or the Ring A closer is as set forth in any one of the sequences depiced in 17D-E; and/or
d. the CPR is as set forth in any one of the sequences as depicted in FIG. 14J or 15J,
particularly wherein:
a. BBE is from Papaver somniferum;
b. CFS is from Papaver somniferum;
c. SPS is from Papaver somniferum; and/or
d. CPR is from Papaver somniferum,
more particularly wherein:
a. PsBBE is as set forth in SEQ ID NO: 48 (FIG. 13);
b. PsCFS is as set forth in SEQ ID NO: 50 or 52 (FIG. 13) or the Ring B closer is as set forth in SEQ ID NO: 485 (FIG. 17);
c. PsSPS is as set forth in SEQ ID NO: 56 (FIG. 13) or the Ring A closer is as set forth in SEQ ID NO: 487 (FIG. 17); and/or
PsCPR is as set forth in SEQ ID NO: 66 (FIG. 13).

64. (canceled)

65. (canceled)

66. (canceled)

67. (canceled)

68. The method of claim 63, wherein the method comprises the second fermentation and wherein the cell further comprises a fifth heterologous coding sequence encoding a fifth enzyme involved in a metabolite pathway that converts (R,S)-norlaudanosoline into the metabolite, preferably wherein the metabolite is (S)—N-cis-methylstylopine.

69. (canceled)

70. The method of claim 68, wherein the fifth enzyme is tetrahydroprotoberberine cis-N-methyltransferase (TNMT), preferably wherein the TNMT is as set forth in any one of the sequences as depicted in FIG. 14G or 15G, more preferably wherein TNMT is from Papaver somniferum (Ps), particularly wherein PsTNMT is as set forth in SEQ ID NO: 58 (FIG. 13).

71. (canceled)

72. (canceled)

73. (canceled)

74. The method of claim 68, wherein the cell further comprises a sixth heterologous coding sequence encoding a sixth enzyme involved in a metabolite pathway that converts (R,S)-norlaudanosoline into the metabolite, preferably wherein the metabolite is protopine.

75. (canceled)

76. The method of claim 74, wherein the sixth enzyme is (S)-cis-N-methylstylopine 14-hydroxylase (MSH), preferably wherein the MSH is as set forth in any one of the sequences as depicted in FIG. 14H or 15H, more preferably wherein MSH is from Papaver somniferum (Ps).

77. (canceled)

78. (canceled)

79. The method of claim 74, wherein the cell further comprises a seventh heterologous coding sequence encoding a seventh enzyme involved in a metabolite pathway that converts (R,S)-norlaudanosoline into the metabolite, preferably wherein the metabolite is 6-hydroxyprotopine.

80. (canceled)

81. The method of claim 79, wherein the seventh enzyme is protopine 6-hydroxylase (P6H), preferably wherein the P6H is as set forth in any one of the sequences as depicted in FIG. 14I or 15I, more preferably wherein P6H is from Eschscholzia californica (Ec), particularly wherein EcP6H is as set forth in SEQ ID NO: 62 (FIG. 13).

82. (canceled)

83. (canceled)

84. (canceled)

85. The method of claim 81, wherein (i) the BBE, CFS, SPS and CPR are expressed from (i) plasmid(s); or (ii) chromosome; and/or (ii) the TNMT, MSH and P6H are are expressed from plasmid(s).

86. (canceled)

87. (canceled)

88. The method of claim 1, wherein the method comprises the second fermentation, the substrate is (S)-stylopine and wherein the metabolite is (S)-dihydrosanguinarine, preferably wherein:
a. the first enzyme is tetrahydroprotoberberine cis-N-methyltransferase (TNMT);
b. the second enzyme is (S)-cis-N-methylstylopine 14-hydroxylase (MSH);
c. the third enzyme is protopine 6-hydroxylase (P6H); and/or
d. the fourth enzyme is cytochrome P450 reductase (CPR),
more preferably wherein:
a. the TNMT is as set forth in any one of the sequences as depicted in FIG. 14G or 15G;
b. the MSH is as set forth in any one of the sequences as depicted in FIG. 14H or 15H;
c. the P6H is as set forth in any one of the sequences as depicted in FIG. 14I or 15I; and/or
d. the CPR is as set forth in any one of the sequences as depicted in FIG. 14J or 15J,
particularly wherein:
a. TNMT is from Papaver somniferum;
b. MSH is from Papaver somniferum;
c. P6H is from Eschscholzia californica; and/or
d. CPR is from Papaver somniferum,
more particularly wherein:
a. PsTNMT is as set forth in SEQ ID NO: 58 (FIG. 13);
b. PsMSH is as set forth in SEQ ID NO: 268 (FIG. 13);
c. EcP6H is as set forth in SEQ ID NO: 62 (FIG. 13); and/or
d. PsCPR is as set forth in SEQ ID NO: 66 (FIG. 13).

89. (canceled)

90. (canceled)

91. (canceled)

92. (canceled)

93. The method of claim 88, wherein the TNMT, MSH and P6H are expressed from a plasmid.

94. The method of claim 5, wherein the host cell further expresses a cytochrome b5 (Cytb5), preferably wherein the Cytb5 is as set forth in any one of the sequences as depicted in FIG. 14K.

95. (canceled)

96. A plasmid comprising nucleic acid encoding: (a) the 6OMT, CNMT and 4′OMT2 enzymes as defined in claim 5; (b) the (i) BBE, (ii) (a) CFS or (b) Ring B closer, and (iii) (a) SPS or (b) Ring A closer enzymes as defined in claim 63; (c) the TNMT, MSH and P6H enzymes as defined in claim 89; (c) the CPR enzyme as defined in claim 57; or (d) the BBE enzyme as defined in claim 63, preferably further comprising a terminator and/or a promoter, more preferably wherein the plasmid is as set forth in:
a. SEQ ID NO: 7 (FIG. 13, pGC1062);
b. SEQ ID NO: 8 (FIG. 13, pGC994); or
c. SEQ ID NO: 9 (FIG. 13, pGC997).

97. (canceled)

98. (canceled)

99. A host cell expressing (a) the 6OMT, CNMT and 4′OMT2 enzymes as defined in claim 5; (b) the (i) BBE, (ii) (a) CFS or (b) Ring B closer, and (iii) (a) SPS or (b) Ring A closer enzymes as defined in claim 63; (c) the TNMT, MSH and P6H enzymes as defined in claim 89, and the CPR enzyme as defined in claim 57; (d) the enzymes of (a) and (b) or (b) and (c); (e) the enzymes of (a), (b) and (c); or (f) one or more of the plasmids as defined in claim 96, preferably further expressing cytochrome b5, more preferably wherein the host cell (i) expresses the enzymes of (a) in a plasmid; (ii) expressing the enzymes of (b) in a plasmid or in a chromosome; (iii) expresses the enzymes of (c) in a plasmid; or (iv) expresses the enzymes of (b) and (c) in a chromosome, and more particularly wherein the host cell expresses in a plasmid the enzymes of (a) and BBE; and in a chromosome, the enzymes of (b) and (c).

100. (canceled)

101. (canceled)

102. (canceled)

103. (canceled)

104. (canceled)

105. (canceled)

106. (canceled)

107. A CYP719 polypeptide that is any one of EX45-48 (SEQ ID NOs: 324-327), EX53-58 (SEQ ID NOs: 332-337), EX65-76 (SEQ ID NOs: 344-355), EX78-80 (SEQ ID NOs: 357-359), EX82 (SEQ ID NO: 361), EX86-93 (SEQ ID NOs: 365-372), EX95-101 (SEQ ID NOs: 374-380) and EX104-105 (SEQ ID NOs: 383-384).

108. A method of preparing a benzylisoquinoline alkaloid (BIA) metabolite comprising contacting (a) a CYP719 polypeptide as defined in claim 107; or (b) A CYP719 polypeptide that is any one of EX43-44 (SEQ ID NOs: 322-323), EX49 (SEQ ID NO:328), EX51-52 (SEQ ID NOs: 330-331), EX63-64 (SEQ ID NOs: 342-343), EX77 (SEQ ID NO: 356) or EX103 (SEQ ID NO: 382), with scoulerine, nandinine and/or cheilanthifoline.

109. A method of producing:
(A) (i) N-methylcheilanthifoline; or (ii) N-methylscoulerine, comprising contacting cheilanthifoline or scoulerine, respectively, with tetrahydroprotoberberine cis-N-methyltransferase (TNMT), whereby (i) N-methylcheilanthifoline; or (ii) N-methylscoulerine are produced; or
(B) nandinine comprising contacting scoulerine with a Ring B closer as set forth in SEQ ID NO: 483, SEQ ID NO: 484, SEQ ID NO: 485, SEQ ID NO: 324, SEQ ID NO: 353, SEQ ID NO: 320, SEQ ID NO: 363, SEQ ID NO: 338, SEQ ID NO: 378, SEQ ID NO: 333, SEQ ID NO: 377, SEQ ID NO: 344, or SEQ ID NO: 374, preferably wherein the Ring B closer as set forth in SEQ ID NO: 484, SEQ ID NO: 485, SEQ ID NO: 324, SEQ ID NO: 333 or SEQ ID NO: 377.

110. (canceled)

111. (canceled)
